United States Patent Application Publication US 2026/0265781 A1 - sequence listing, part 19

SEQ ID NO: 118 - DNA, 18231092 bp, synthetic construct (residues 12,154,063-14,179,739 of 18,231,092)
  source 1..18231092: mol_type = other DNA; note = Hot spot 2 - Chr 3 contig ref|NW_020822577.1 from Cricetulus griseus
taaataagtaggagctaattttagtcagtgataagcactatgaagaaatggcaccaccaccattgtttttgtccctgtatcagcttgctgaagctaccatgacgaagaatcatacagtgtggggggaaggtggggtgcacacaatggcagccacttctctcagctctctgaaggggaggtcggggctgcgctttcactcagtctccctgcttaacttgcttgtgttctcacaggggtatccctctgaacacaggctccctggtgtctgtcctggtgtaagccagtggcaagccacctgcctggcaggcacaaggtcaaagaaccagtgagcctgattaggcctctcttacagcatcgttttaaatctggtcacctctttaacaccttataagctcacattgtgagctatcagattaagatttcaaaacaccaggagaaaacacttcaagacaggtataggcaatgatttggtggtggtggcaaaggagaagcggtggaggtggtggtggtggtggtgatggtggtggtggaggtagtggaggtggtgatggtggtggtgatggtggtggtggtggtgatggtggtgatggtggtggtggtggtggtgatggtggtgatggtggtgatggtggtgatggtggtgatggtggtggtgatggtggtggtggtggtggtggtgatggtggtgatggtgatggtggtgatggtggtgatggtggaggtggtggtggtgatggtggtggtggtggtgatggtggtagttgctaggatatccaaagtacagccaacaaagcagttttaggcaaacggtattccttcaagacaacagatgaagagacagctatagaatagggaaatatttgtaaactatgtatctgaaaagggattaataactagaaaatacgatgaatttgaacaactaaaaagtctctgaattttaaaacaggcaatgatctgaatggacatttttcaagagaagacatacaaacagaccacaaaatgaaaacatgtctgatgtcactactcactagagaaccacaagatatcatctcacccctcagaacggcaattaccaaaacagtgccaagtatcaagtgccagggagggtgggagggtcagtagtctgtcagagtctgacagactactgacgggaatgtaggttagtgtgacctggagaacgctatgagcatccctcacaagactaaaactggagctactagagcatccagccattctgcttcagctgcatagtcaaagaaatcaaataagtgtatcaaagacatctgcacacagctgtttgctccagcatgatgcgaaacggcaagacgggaccaactgagggatgtcagcaagcagacggataaaggatggatacacggacacgcacagaaaactacttgccaattaaaaaaaatagttagcatttgcaaaaagcagatgtaactggaggacattaaacaaaacaaatcaggcacagaactacaagtaaagaccacaggagaatagcgactgatggcaggaaggggacgggaggggtgatggcaaatcttagcacacagaagacaggaggcgtgcgttctaaacctacagcgcagaacagcgactgcagctttacaaggcctttatacaatggatggagacctagagaaaaggaattttagaaactcaaaaataagataaatgtgtaagatggaaatgttcattacccaagttgatcaatacaccttgtgtacatgtttacaattatatcatgtgtgtcccatgcagatacaaattatcatgtgtcaatttacaagaaaaaacatttcaaaacatgaactctgggtacaacaacagtattgtctcttacaccctgctgccactgcactgctgactgccatcccccagcctgggccactgcactgctgactgccatccccccgcctgggccactgcactgctgactgccatcccccagcctgggccactgcactgctgactgccatcccccccgcctgggccactgcactgctgactgccatcctcccccacctgggccactgcactgctgactgccatcctcccccatctgggccactgcactgcagactgccatccccccacctgggccactgcactgctgactgccatcctcccccatctgggccactgcactgctgactgccatcccccagcctgggccactgcactgctgactgccatcccccccgcctgggccactgcactgctgactgccatccccccacctgggccactgcactgctgactgccatcctccccacctgggccactgcactgctgactgccatcccccacctgggccactgcactgctgactgccatcccccacctgggccactgcactgctgactgccatcccccacctgggccactgcactgctgactgccatccccccacctgggccactgcactagcctgtaggttgatactctgcttctgctctcccagccactctccttacagcagccacagcaaactttcgaaactaaaatcccatggtgtccatggcgtccacctgcactgtggtgcactccttttcactgccagaatgctctccgtgggctatcaaccttcacatgtacagcactctaaaacacacgccaactactctcgcctctgcttttcccaacatgctaaggctgtttcccttcacaggacctttgtgtttacttcccactaattcttcatgtaactatttctagtcttctctctctctctctctctctctctctctctctctctctctctctttctctctcttcgtgtgtgtgtgaatgtaaatgtgcatgagtggcctcgggggtagaaaaagtggctttgtcccctctctcctcttcaaggatcctctgtgagaacagcaagcactaaccactgagccatctctcccactcctgtaatatgttttgatatcaaataaaactacactggcctccttgctcttctttatgagttcccttggcttttccagcttaccttttcatatgtccattaaaattcacttgtcaagttacagaaaatgtttgtttccatttgtgctgaatttatgccaatttagggtgatttgacacctttattatttcaaattttctatccctcaaacatggtttctttccatttgttctatttttatgtcatgtgggttttcctgtgatatgatctatatgtttcttgttacatctttgtctataaactgtaatttcgctgctattataaatgggtcttagcctccattatatcatctaactgtgcactctttataggatattaagactcctggtttctatatattcatttatttgaaatatgtatttatttctctttgtaatgggtgtgatggagtccaggaacacctctgccacagcgagaaggtggaggtaagaggactactcccaggaggttgggcgctcctgccaagctgtaggatccagggattcctcaggttgccagggctgcacacagcactcttcctgctgaaccatgttaccagctttctatatgttaagcttacttcttactactttactaaattttatttctcaatgcaatagctttcttatcaattctcctagattttctagatatttggtcatatatatgaaataaattttccttctcctaccttttctgcctcctaccatctctcctgcagtactgatatccatgttaccacttgcccaattgtgttggctcatgctctggattaatattactttacaatgacaaatgtagatatccttatcttgttcctaactataacagaaatgctgcacacccctcctcattaagtaagaaccttgctttggggtaaggaagcaacccctaatgcctactttgttgaggctttaaaattatgaacatgtgctgaattctgtcaaatgcatcttaactatctatagggatgatctatgagacgtcttctcgggtatagtgatacgatatgctacatcaataaatgtctaacacaatactacttttatttctttcatttttttctttttttgtttgtttgtttgtttgtttttcaagacagggtttctctgtgtagctttggagcctatcctggcactcactctggagccaggctggcctcgaactcacagcgatcctcctgcctctgcctcccgagtgctgggattaaaggtgtgcaccaccactgcctggcttataataatacttttacattcctagaaaaaaaaaacacagttcacattaatgtgctactactgcttttttgttgtatttatttatttatttatttatttatttatttattatggttttttgagtcagggtttctctgtgtagcctagaactcagtctgtagaccaggctggcctcaaactcatgagattcactgcctctgcctcccaagtgctgggatcaaagacatctgccaccaatgcccagctttgttgctactattttattagcaatttttatcctattaggtttttggtgtccagattatatatgctccagaaaaaataatccagaagttttcctttttgtcccatctcctgaaagagattaaattacataaggactaaaatttaaatttcaatatgcagccatctggactaaagtcttttagttatggaccctttgaaaacctggctactggtgctacagaaaggagcgtgcctagattttctatggatagattttctaggatctgtctggtttgttttttcttcaattgattttcttaaatattattttattcttttatgtaatgtgtctatgtgagtgagtgcctgaggaggccaggacagggtgttggaccccataaagctggagttacagatggttgtgagtcccctgagctgggtgctgggaactgaacttgggtcctctgcagagacagtacaagctcttaacccctgagccatttctccagccctcttcagttgattttttaaaatacttttttgagattataattataattatttctcccttcggtttcctccctctaaaccctcccatatgcctccttgttctctttcaaatccacgtctttttcgttaattgttgttacacacacacacacacacacacacacacacacacacacacacacacacgtgcgcgtgggcacgcgcgcagacccgcacgcaggtgttcctaatacaacctgcttggtccataaaatgttacttgtgtgtatgttttcagggctgaccatctgtattgggtaaccaaatggtgtgctcttccctggggaagactatttccccgactgtcagcatccctttgatgtggttctttgtctacggctgaggcctcttgggcattgccccttccatgttagcatgtctactggtgttgcccttgtttggtcatgattaggcagccatgccggtgagacaccatgggcggagcttctctgacatttctagcagacacaatttcatgacaaacttgctattctctggctcttacaaccgtcctgccccttccacagtgacccctgagccttaggtgcaggagttgagttattctctggctcttacaaccgtcctgcccccttccacagtgacccctgagccttaggtgcagagctgagttacagatgtagcagttggaactgggctccacaacttttgcattttgatcagctgtggttttctatgatgtctccagagtaggaatgtaaaaagtgaccagtgctgcaggcagtcggcagagtagcacagagctgaatagcaggggacaagtgctctgatgtgggaaatgacaacaaacactgagggttttaattagggagggaggaaaaggtaaattcaggcggcaggaaggtaaaatagcagtaaagctgttgggaaaagtaatgagaaatcatactattatctacctaaaaatgcctacgacacatgtaagttggtgcataaatatatagtttaaatgacaatttcccacctgggatgataagactcccccaaagagccattggctatttaacaaaaaccccaacaccatacatgagaagccctcctttaagctgttggtcagagtggtccaaaggactcccaaaacattaaaggctattgctattgccctttgttgcctcccaaccactaaggaactgtccaatccaatccaaagccacaaaatttataccaatggctttttcccaatagttctgtacctttaagtcttacatgtgattttttttcttttgagttagttttcatacatggtatgtgggaggaattcaagatcagacatctgcacgtggatatttagtgttcctagctccacctttgctagagatcaaataaagaacagtctcagtaaatgtagctctgaagtaaactttgaaaacaggaagaaggcatccaaccctctttttcacttccaagacttcaggttatgccaggtcccttacagataaatataaatttcagagaccattcgtcggctcaggacgggagctgcaactcaatggaacagtatctgctgaccattcacaaggctttttatcaaacatctagcctgagaaaaagatgcagagagacgtgggagggaaggatgagagagagagagagagagagagagagagagagagagagagagagagagagagaggaggggaggggaggggaggggaggggaggggaggggaggggaaaagaaagacttgctaacaactccacccatcttgatatgtgctggaagtggcaagtttccttgccccacattcaactgacgaagacttgattcatggcctactagaccacatcccatatccccttctatgtccatgagagtctggacgttagagtgaggctacagctcagaagaagagaaaacataacaagatcacccatgttccacacggtacccacagagcactaatcactaacacaaccagtgagttcaccacagagttccaaatgcctgtctagatatggggtcagaattcctagtaggcctcactgcctcactgggttttgggaggtaattatatcacaaatgaagcaaggtccctgcaaaatccagtccccattaagggtttcttcctaaacaaatttgctatgttttgtgctgtttgatctgtctccccaggcacaacgccttgaaccagaggtcaccaaagtcacatgtcaggagaggcctctgaagtctagcagcagctcgactcaacaagggcacccactgccaaatattaatacgtgataaaagtagaccttctttgttcttccctgggagttttgaagcgagacagagagcactgcctgagcgggagggcagcagcagagaaggcagtaagcagtaccctaagaccgcagagccctgagtgggcagacacagagtgaagaggcaggtgttagcgtagtcggaggcagcaaagaactgggaagagctgtcactaggctgctagctgggcagagattgtgtgcagccaccacagtgacaggaaatacagagagagcccctgaatcctctccaaggcaacaaacaccaacccagtgagtgtgaaggtcaagagcactgcaatggacttccacttttccttcttctgcatgcatgcatgtgtgtgtgcaagagagacagacaaagtaaatgctgcagtgtgaataggctactctttttttttaagattttatttattatgaatacaacattctgcttccatgtatatctgcacaccagaagagggcaccagatctcataacagatggttgtgagccaccatgtggttgctggaaattgaactcaggacctctggaagagcagtcagtgctcttaatgtgggccatctctccagcccctaggctactcttgtaagtacaaacaacccataagataacttggaggaatacaaggaattttgaaagtattgatttccttttatagcaacaagctaaatgaaaacacactctcacccatgcatacacattcatgtgcctacagtctcctaaaatcttcttttctgaacttaaattcacgtcttaaatgacaagtatttgagacttcacaatttctttaacggaaattagttttttcttttgttaattcaattcttttggacagagtcttatgcagccaggccagcctagaacttatgagctaggatgactttgaactcttaaccttcctgcctttcccttccaagagctatgatcacagatatgagccatgttgcactcaagcacattatttttatttttaaaaaggacacaattaggccgggcagtggtggcgcacgccttggatcccagcactcgggaggcagaggcaggcagatttttgtgagttcgagaccagcctggtctacaagagctagttctaggacagcctccaaagccacagagaaaccctgtctcgaaaaaccaaaaagaagaagaagaagaagaagaagaagaagaagaagaagaagaagaagaagaagaagaagaagaagaagaagaagacacagttatgaccatgtatctatagctttcttctcctcctaagtcccagtgacaaaccaaggtacaattctaccaaacctcattttggggacagatgagtttaccagacttacagagcaataggtgaggggggacaggcataggcatgtgtgaccttaaagcagccacactgagaggtctgcacccagcataatgatgactgccacacggctgtgtagatggagtcccctcccctaatacccagagactctaaggtcatgcacaatcagggcagaaccacgtacaactggctgggagggggtctcatgacctgctccttccttccaagaaagatcatccctcttctgtaagagctgacataggtcaactgtaagcctaaagtgcagccgtgtgcagctgaggcactgaagcacaggaccaggacagcaggtgtggccagaagacgggcaagagcagccctttctcccagggtggagttaactctgttctagttaactctcagattcccaagtatcagctgttctgaaattggtttaacaaagtatgtttaaaatgtttctatctgacacaatcttataatacctatcaaaattcactcccccccccttttttttactagacagtaatggtcttatttaagtgtggcagaaatcattagttcaacttaatagataagaaaaatagatcaatcaaaaaggatgtagttatggtttttggggtttttaattatttattttatgtgcattggtgttttgcctgcgtgaatgtctttataagggtattggatcccctgaaacaagatttacagacagttgttagctgccatgtcctctggaagagcagtcagtgctcttaaccactgagccatctcaccagcccccaaggatgcaattctgaaagtcagtggtgagcctgaaactgaccctattgacatctagcattcttgtatcctattaaatacaaaaagaacagattataaacagtgagatttcttggcaaggttatagctcctttcaaactgaatttgcaaactagccatgtagacaaaatactttcttggcctttcaagcattccttaaagaatatgtttctggttttgtattatttattttcaataaattaattctgttcagggtaaccaaagttatgctattatgacaactctccagattgtgggatagctcaatggtaaataaaatacctgtttaatatgtagaaggtccctgggcctggcaggaaaaaccagtaacaaacaacctaatgtaatagctttttttgagaaaaggtctgactatgtaacactggctggcctgaaatttactatgtagagcaggctagccccaaacacatagacatctgcatgtctttgcctccagagtgctgaagattaaaggtatttgccaccatacccatccagcaatgatctttgtctccaaaaattaaattcacacacaaaaggttggtaatctgaacgttttttttttaagtttcttaatgccagtaaataaaatcaaagggagaagacagatggtattgatcacacactaagatctttaatttatagaactagaaataattaaaaagaaaaataagcaaaggtcataaactacccttgcaaatagaaggagatacaagtaatttttagagctagaaaaggtgttcatggtctggcaagatgagtcagtaggtaaagatgattgccaccaaggctggaggcctaaactgggtctctggaacccacacagaggaaaaagagaagtgactcccagaagttgtcctggcctccacatgaatgccatggcaaatgcacccctcaacatacacacacacacacacacacacacacacacacacacttaaacataaccacaaaaagcaaagaagaaaggtgttcatattttataaaataaaaagtaacagtttgacaaactgtttcagagagagaaaaaacaggcaacttcacatggcaagatagaaaaccattttctcagggtatcaatatgtaccaaaactatccatgcattttgacctgtttctaagaatttatcctacagaaaaagtcttacagttgcaaaatatgatatacaccaagagtttctgcagcatggattattaaagcaaaagcctataagcaatttaaattatcaattaatggaactttatgataatgtattatgatacattgacacaagaaatgagaaacatagagaatacaaaagaataaccatcaaaatatattgataagtagggcaggttatattaattccagtagagtcaggaagatctctatgaatttgggaccagttcagtctacatagagagttcctgcctagaaggccacatagtaagaccctgtctcaaaaaaaatttaattaaaaaataataaaagatattgataactgataaacaaaaaagctggatacagatgtttatataataccttattcacttatgttaaaaatgcatacagccagatggtggtggtggcacacgcctttaatcccagcactccagaggcagaggcaggcagatctctgtgagttcgaggccagcctggtctccagagcgagtgccaggataggctccaaagctacacagagaaaccctgtctcggaaaaaaaaaaaaaaaaaaaaaaaaaagccagatgccagatgagcatctgtaatcccattattcctacactgagatgagagtggaggcaagagaatcacaaagctcaagggccagctagaatggagtgtgcagccctgcagatacagcaagggatcccaccccgccaccaagaaatacgccggaagagccaactcctgacagctgttctctgctctccacatgggcatgcactggtgcacacacctaccagcaccagcacctctctctctctctctctctctctctctctctctctctctctctctctctctcacacacacacacacacacacacacacacacacacacacacacacacacaaaatctctagaagaatcagagacacttgtatacaagagttagaattagagactcacttaagaaatattctcaggctggagagatggctcagaggttaagagcactctgctcttccagaggtcctgagttcaattcccagcaaccacatggtagctcacaaccatccgttatgagatgtggtgccctcttctggtgtgcagatacacatggaagcagaatgctgtatacataacaaataaataaaatctttaaaaaataaaagaaagaaatattctctgtatctttaggatttttctccacatgtatattttatctatccaaatatttaattttcaatcttattaatttctaaatatagactaagaaactatatataagagataatgaaatgtattatgctctatgttttatattaagcaaaatcaaaatgattctagttaatgatattaaaaagctgcccagtattttccaaggagctaggtttcaaaacctaatttaaaaatggaaaggaaaatgaaatgctttataacccaaagcataaaacaatacggaaataagttaaattttcatttaagatactattacatataacacaacattgcttataccatattaaataggagaaaagttttaattattaaagaatataaagtggaacgacaatgatagctaataatatttgagctaattgcttctggttaataattttctaaaagctataaaaatgtccactgatgactggggtctgtgtgtgcatgcgtctgtgcgtgcgtgcgtgcgtgcgtgcatgtgtgtgtgtgtgtgtgtgtgtgtatgagcacatcaagggatagcttgtaaagtttgttctctttccattctgtggatcctggaggtcaagcctgggtcatcaggtaagcaattttacccactgagccatcaccagccctattaattcctttagaaataagtctattatatgttatataaataaaattgtgaacaacaatgttgcacatcatgtagccttttaaaacctcatgataaaactaagactgaaaatctttaatactggaggttggaaagacggctaagtggttaagagcactggctgctcttacagagtcctgggttcaattcccagcacccacgtggggggagaggctcacaactgcttgtgacttgcagggaatgtgacaccttctcctagtctcttgggggacctacacacatttgtatatgtggtgtatacatggtgtacagtggtgtatatacactcagctacagccacaacactgagcagaagaaatctttataaatatacctaatactgcctttgctttattaatcaaatagttttaacttctcaggcacatgcagtgtcttggagatgtacagggatatctggaaaccagaggagaattcctatactaccagtgagctcctctgcatcagaaagtagagcttaggactagaaagtatgtttattcccaggtccaaggaagcagaggagacatttcaaatgtttccgagagaagcaagcatcctgctgcttgcttggcactcacaatacccagtctcttttctatttgtgaggataaaacttccaatgaaactttcgattcgtgcacagcagagagaaagggaaaggaaagaagccatcaatacaatgttcaaggcagcctaggtctacagtgagggaagcaattccatatttcccctgaggcagtcatggcctgacttcctcttaaagacagctctcctcctgcccagtgcaggccatgtgaatccctctggagctattactacacattaaaacacttttgggggttttgagaggcattaaaaaaaaaaataaaaaaaaacaagttcctactgtgttgcctgggctggccttgaactcgtggttatcctcttgcctcagcctcccagctgctgggattatgggcatgagccgacagatctgactcaagacactcctctacaccattcagcctgcataggatactgctttcagtccttctgaagaataataatctctctacctgatgttaaagcatttgatagattgatagctcttaatggagtattgaactttttgaagataaagcaatagatcagaagccagttggaactggatctaattgtacaaaaggaagcatgctataccctaggcctaacaattcaaacagcaaatacaaactgtttattaagttaaaagtaaacatctatttagactttcacttttaaccataagccataataaattccaaacagagcaactgcttttataaatggggagagttgaccctgtgcatcacagcattcccagggcctcccttggggctggtgtgcagccaacttggaaaacgttgctgaacagaaaaaaaactctaactcgacttccaactctgctgatcactactgtgcaacctgggcaaatgtttctgtgtctctgtccttcacatctagtttataaagggtgattcaaaatgactccaagaacatgagatgaagttccatacaaatcagtataaggagtcggcacagtagcctgtgcaactgggagtgcagctcttggaggctaaggcaagaggactgctactgctacaagttagaggccagcctgagctacacagctacttgaaggccagcctacactacagagtctcaaaaggaaagggaaacaaaacaatagcattagaaatcaagattagaaagctgctgtcatccacatcactgttcttctactatgcttagcattagtattttagtgctaagaacaatgcccactcttagtaaccatctttatttaataaagtagactaaattatgggagcatacactttcccttggggcctcagtaaaattgttttattttggtatggggaagttgtagcccataaacacatctcttcggcccttttaccaaagaggcctggctggcatctctacactatggaataggggaaaatctgtttcactgtaactgtcaagaaagccaaaggcaagacgcaggcatccatgaagggctgggctgggagaatggaggcaggagggcatgctcccaagtacagtcagggacttggagttggaaaagccctggtgtgatgctgagcaaagtatatacttgccatttgtctccaaaacagaggtgccacccctcccacacaaaacattacaatgaggtgatagacacaaagctccgagatgtcaagtacaggatagccagactgtcagctggactgtgaatactttttctcttttcctctttctctcaccaagctatgggagggctgggatgcagtacaaagcttgcctggcaggaacaaagccttggaatccatccccaaagatcacagccaaacagacacatctaaagctctactttccctgacttttctaacattacttctcccaaggccctggaggagaaccactcaggttcaaggagaggttagaggacaagaactagtccgtcatatatctcgtccatctaatggcaaggtattgcttcatgccccatgctactcagcaagccctgtaaccagcaccatccctcccagctgaaaggacacacagacgaggctcagtgctctttctagagtccttcccatagaatgagatgtgaccagagcttctgggagctacatggtgctgctatgctgcccttaagttcctgtcacacttccactacaatgactgaacccagactcacactgcctctggtggttaacctagattatcatcttgacaggacctagactcaactaagtgagacaagcctctgagcatgcctgcgggatacgattaggtcagcgtctaggcatgcctgtgaaggttaatggagtgaatgatccccttaaccgtgcacagcaccattctacaggctgggttccgggactaaacaaaaacaagagtgatctaaacttcaacttctctctctccctcccgacgatggacataatgtgaccacctacacaagctctggctgccatgacaccctcaccatgacaggctgcattctcaaactgggagccaactaaaccttcctttccttgagttgcttctgtcagcttattttgtctcagcaagacaagtaaccagcagagcccaccacaagtcaggtgctatggggacaaatttaactgtcttccaccttatctgtcacaactgccttacacataaatctagaatacaaaacaaaactttgtaagtgttaatatgaagacatgaagctgctcacacttgttaatctcagcccctctggtataagaaactaaataatgcatatcgttacaatttacaaataaagcctcacactgttcattccgtttggctcaagtctgaagcacttggggccctggctcgcacaggaagggatgggtggccccagctcataagcagccccttgttgtaccattttacatcactcttccactgctttgctggcctcagcatgagacgctctcagcctatgaactcagcaagtaaccatcactttgcctggcctcctggaagactgaattcatggctgtccctggcagtatgtggcacagacctacaatttctattagagtcctatgggatttcctctactttcaccccctcagatgggagcctcagatgggctccctacgtggcccaggctggcttcacattcctaatcctcctaactctagctcctaaatgctgcaattacaggtgtacaccaccacaccagtactcaactccaaatctccgtatcttcatcgtgtctttccatttctcacgctctgtttagcccattttatattttacttgggaagtatatcattctgtaaacattattattctttgtaatggtgccttgatattatataccgatgcactctgtataatcttattaaaatgtgtattatgtgtgtgtgtatatacacactataatacagcagttatatatcgatgcactctgtataattttattaaaatgtgtgtgtgtgtgtgtgtatacacactataatacagcagttatataccgatgcactctgtataatcatattaaaatgtgtgtgttatgtgtgtatacacactataatacagcagtttctcaacctgtggatcacaatccctttggagtcgaatgaccctttcacaggggtcatctaagaccatcagaagggctggagagatggcttagaggttaggaacactgactgctcttccagaggtcctgagttcaattcccagcaaccacatggtggcttgtaaccatctataatgagatttggtgctctcttctggtgtgcagcatgcatgtaggcaaaacactgtatacctgataaataaatcttttaaaaaaacaaggccatcagaaaacacagatatttacattatggttcataacagtagcaaaattatggctatgaagtagcaaggaaaagaattttatagtgggggaggtcaccacaacatgagaaactgtattaaagggtcccagtattaggaaggttaaaaaccatgctctaatatgtatagtgtgtgtgtgtgtgtgtgcgtgtgtgggggggggggtgcgcgcgcacgcgcgcgtgcgtgcgtgcacacacagaggccaggagaggattcaggtgtcctctattaataggaggattaattaattaatcctcctattaatctctttatccccctgagacagtccttccctgaacctgtagcttattgttcactagactgactgaccactgaattcctgcttgtctctctctgccctccaatgctggggtcaaaggtctgtgtggccacacctagcttttccatcagcactatggatgcagacttgggttctcgtgcttgcacaacaagcactctgacagacttagccatctccctagcccattacttgtacattttaaaatgcaaattctactccttcactaaacagagatttactaagtaccaaacattggccatcactaaagctctaatgaagttcatctcacttggttcagagtctataggctgtaattgacaataataatatagtctacccactagactacaaaaaaaaactaggaaaaagtaaaatgatttaccttgaagtggtagttagaaaaaacagagcacaagaaaataaatactttaaatagcacaataaactcaaagtacagtttttaaaaaaggagaaaacatcccctttctatctatgacttgtatccataattgagaataacaacaacaataaatatttccaaacctcacatccactgtattatttgtttcatggtcaaacacttcaaaggcctctttgatcttcttatgaaggtctgccactattgcctctgcaaaatacaatgtaaacaaaattaattattaattcaatacaaaaatctcagtaacctaactagaaatcttttgggggttttctttgtttgttttgtctgtctattttgaggcagggtctcactatcgcaatatatagaccaagctgtctttcagttttctcaatgctgagactccaggtatgtgccatctggcctagctaaagcagaaaagtaaataaggaagaacctgaaagaagcttggtctcttggtctcctttataaatcgtatgccatgttaactccctctggaaatgccaaagaacagatctgacaatagcaagttcaagaaggaaggggctgttccggtacagtccctcatgttggggaagtcatggcaccaaatattttttctgcgatataacagtaaacttactgccaggcattggtggtgcacacctttaatcccagcacttgggaggcagaggcatgcagatctctgtgagttcaaggccagcctggtctacagagtaagtgccaggataggctccaaagctacacagagaaaccctgtctcaaaaaaaaaaaaaaaaaaaaaacagtaaacttacttcaactttcatcttgtgtgtggtgtggcatggtggtggtggtggtggtgtgtgtgtgtgtgtgtgtgtactcaagagtgtgtgtgtgtatatgtgtgtgctcatgcccatgccaaacatggagctcactgtttcagatggattaggtaggcacaccccagaacccacttgtctctgcctctgcactcctggagttatagatgagccctgcttaccacccccgcccccgccttatatgtctgctagggattcaaacccaggccctcttgtttgtaccacctctttcaatttcagtcgttgaggcatctccctactgagcaatctctgcaattcctaattttgatctgaaatacacagtgtacataatactaaaagtcaccacccagttctcaattggagaccttcattctaggctcaacaaaaaaaggtaagacaacaaacaccatctacttattaggcctgctcatcacctttgttctgttcttgaggaggagtgaaggtaggtgagaggcatttaaacccacctgggcatctttcaaagaccttttaaaaaggtgggattaaactcacttacatgaaatagtgatgtaggcaataaacattattgagaatgtgctacattccagacactaacaaggtcatagcaagaagcaaaggcagactaaagttcttcctcacagctgttttattggaaatatatatatatatatatatatatatatatatatatgctacatatttgctgacatatacagtaggttgcatgcccttaaacacagaaaaaaagagtaagagatgtgaagagtccccatgagaatgccgaccttagtgacaaggtgacagctccagataggaagagcctacctgtaaatatctccagaacattttcacacagagggcacagaaagtgcagaacagcaacctaaaaatcagatgttttgagctgttgggtggagagatgaatcctttaaggattttgaactttcctctgaataccacgagaaaccactggaaggttctaggcacaatattgacctgatcttcttttcacctttgtcactgtgctgagaagacacttgaagggaaaaggtagtcacaaagagtgtctagagactgcttcagtatctctttcagatatggtcactggttgtctctattgctgtgaagagataccaagacaacagcaactcttatgaaggaaaacatttaactggggctggctgacagtttcaggggtgcagtccattgtcatcatggcgagaagcatggcacaggcaggtagacatggtgctggagaaggagctgagagtcctacatgtgatccacgggcagcaagcagtctgccacaccaggcctagcttgagcatataagaccacaagcagtctgccacactaggcctagcttgagcatataagaccacagagcccacctccacagtgacacacttcctccaacaaggccacacctcctaatagtgccactccctataggccaagccttcaaatactgagtctatgggggccatgcctatgcaaaccatcacagtggctgagaccagagacaggattctggttatgatcactaagatgtgctgacaggtttgatgtggtgagggtcaagactgactcccaagtgtttctatgaggaaaagaacggggcaactagagatacatctcagtgatgaagcacaagcgaggagctgtaagatgtcgaatctcatttttacactgatacagccatgtcatcaagcctcaaagtttgtgaagcaatatgtacaacatgacacctagaaaggaagcgaaggataatgtatgagcatagtttatcacaaatataagagcaccaaatatggaatgagacctcatacctgcccccaccttaggtagaggccacaggaaggagtaataatttagaagtcaaaagaaaaaactggaaaaattttataacactcattctctttattctaatgcaaccactaatcctgttgccatattttcctccaatctttctttctatgtagccttttatagagggcatttcattatcaccattcattcactcaagaagcatttactggaaaattacaaggtgtctagctccagattagaagctttataacacatagaggcatagagcagaatacctcagtcttttttcttcctttctttcttcctttctttctttttttttgagacagggtttctcggtgtagctttggagcctatcctggcactcgctctgtagaccaggctggtctggaactcacagcaatccacctgcctctgcctcctgagtgctgggattaaaggtgtgcgccaccaccgcccggcgagtacctcattcttagaactgaagaaaccaaggctcactgaggttcagcaactcagctaaggtcagagttcattagggcagaggtggatggaatccagatctttcctagtgaatcctgctcctccctcactctcactccatctgacgttagtgttcgtagcataagaactataacctgtagttccttcctttaaatgttcttttccagacttcggcataatcttccaaccttagcagcatcatgggaatacaacaaaatttattgccataattaaattttactataatatggcaaaagctggctaattttataaacaaaacatgaatgttgcttcattacttaaatttacacttctctgattacatgtgaatctcaataacagcccatgtgtgtgtttgccacctgttttcagttattaattgtcagcttgtgttccatcctcaccccctaccaggatcttctattattccttaaccatttgtgtgagctccttggaatacaaagacttagcccttgtcaaaagcactttaatttctttaatttggttttggaaaatgagagcagatgctcttgctggtcatcaaaaccatccaataccaacagcagggcaaaggatacaggagagtttaaattagctaaaaatcatctgaaaacctttatcttctccatgaaaaatcagttagttgatattgttctgtaatctttcactcaaagataccttgtgggccgggcggtggtggcgcacgcctttagtcccagcacttgggaggcagaggcaggtggatctctgtgagttcgagaccagcctggtctatagagcgagtgccaggataggctccaaagctacagagaaaccctgtctcggggaaaagaagaaaaacaagaaagaaagctaccttgtaagtattcttccttctcaaaagatgttgtattatacatctttgtgactgcttggtattcaattagaggtttttatcaaaattaattcaatcaactccataactgtggatatttagattatcttcattagtgaacaatcttgtccagttaatttttgtgcatttgtcatctatctcattgggattcaatggtggaggaggctggggagatggttcagtcagaaaagtgttcactggaaaccatgaggacctgagtacaatcccagcagccatataaaactgggcacagcagcgatgcttgtaacctcaagtgctcagaaggcagagacaggagggtccatagggcttgctcaccagcagtgtagctccaagcctgaaaacataaagtagacagcaatagaggaagacatccgatgttggcttctgcttgccccacccccccacacacacactcatgcattcacacatgcacaatcgagcatatacatacacacaaattcgcgggcacatgcacacaaagacgttgaagttatatggaatatgagaaaggtgttgctgatgttgtcgagacaaggtctcacctatcccaggctgactatacagcagaggatgaccttgaacgtctggtcctcttcccaccacctcctgagcactgggagttcaagcaagtgccaccacacccggtgtaggtatcagggatctaacccactatttcacccatgctaggcaggtactctaccagctgacctacgtccctaaccccaggcaagtacatattagtcataaccatcagaaatcagatagagagcccactgttacccactctggaacggaattgagggcactactggagaaatggcttgatatgccagaaacccaaagggttggcatccatcttaaaatgcatccagttgggattgaggagctagtggctctacgggactgtaacaaacactcatcgtcacacatgtaagccacctctgctcctgtgtagcttctagccttttagcagcagccaagcttgctgtgtggctctgacaagtactgtgtacagattaaatctttatcattattttaagaagcactgtttggagacaagtcctcactatgctgcccaagtaggtctgtaactcaaactcctcctgtgcccatgctctgattataagttaccacacccacccttcaaattattatgaagtaatgattaatataagaaagctcaactgaattgataaaccatttatattagcagagaatttttaagttatatttgtcagttacaaatttgtaactttaataattacaatttttaatggtttcaaagtgttttcacatttttgagtgaagtttctcgttgatggaatactatcaaaaattgagagacttgtacaaaaatttgtatcaagaattgaatgttaggcctagtggtggtggcacacacctttaatcccagtacacgggaggcagaggcagaaggatctttgtaagtttgagaccagcctggtctacaagagctagttccaggacaaccttcaaagctacagagaaaccctgtcttgaagaaaaaaaataactgaatcttaggcccggcatcatggcctacccctttagccctagcacttgagaggcagaggcaggcagatttctgtgtgtagaaagccagccttatctacagagtgagttccaagacagccagggctacacagataaaccctgtctcaaaggggggaaaagtgaatttcaatcatgggtagtgacacacacttgtatcccagtactcaggaggtagaggcaggagaatcaagcatccaaggtcctcctcagctatacagcaaggccttatcttaaaaaatagtgcgtaggcatgtgcccttctgagtgcacgtgaccacagaaacagaagagggtctctaatccctggagctaatttacacgtagatgtgagctagctgaggtgggatctgagaatcaaagttgggtcctctgaaagagcaatcagtgctcttaaacagaaagcaatttaaaacaacaaaaaaaagtaaaaagaatttaatgttttagatgttgtatccagtggggagggttttgaattcaaggccagtctcagctccattgtgcgaccctgtttcaaacactacagggggctggcaagtgagcaatggtgcttacttaccatgcaagcctgacagacaccctgagtcaatccctggaacccatgttaatggtggaaggagagagaactgactccctagagttgtcctctaggctggatacatccaccacagcacacacctccctcccagtaatgataatgatagtaataaatttaattaaaaacaagtggtaacaggcttgcctagcatatgcaaggcaagataaacaaaagtttatctccagcattgcacaacaaaaggttatcaagtcgcttgcttagtaacgtccaaaaactcttctagttattatcccaatattatacaatactatttccatgtgtatgcttcgtgggataaaccgtccatggccccaaggtcatcaccttaaacttttctaatctgctgtggctcaactgtctgagggactcaagactcacctcctgcctttctgcctatggtcacctttcccatctgactcaaataaccactagctatagtctgctcccagtgctactcgtaactcctactcatagcttttcttttccaatttctttaattaagaaactttcaaaacatacagaaaagttgaaagcttggtagcagtcctgtgcccaccacctagagagaagtattgttgagactgccattttttcctgccctccctccatctctaaataatggcaggcacagccatgctttacccctggacacttcaataggcagctcctaaaaataaggacaatctcctatataatctcaatgatattttaatgtccttaaaaaataaccaaattcactataatcatctagtgtctgttccatattccagtgtctccatctgtccccaaacgcctttgccacttccttcaacctaaaattttataaaagttttactgtatttgtgtgtatattttcaacagtccctattgttccccacttcccaccacacctatgagcttgttggctagaccacgctatacaccagcttatgtaatgttccctataatcgggacttgactgacagtttcccttcaattactgatccattaaagtgtgaaagtgtgaatcccttcagggacgacacctaccaatcctcactgctgtcacgaagattcctgatcaagatctctctctctctctctctctctctctctctctctctctctctctctctctctctctctgtgtgtgtgtgtgtgtgtgtgtgtgtgtgtgtgtgtttctctctctctctctctctctctgtgtgtgtgtgtgtatttctctctctctgtctctctctgtctctctctctctctctctctctctctctctctctctctctctcccctcccctaccctcccctaccctaccctctcccctcccctcctccaaacttctcattcagactcactcagtttacaaggcatgtccaaagttctgtttgacaatgaatggattcttactctacttactaaacacttctgaaatatcgtccccttccatctgtactgccaccatttaggtttagaggctcatcacccctgaatggattaaaatcacttcctttcccatcctactcctcaaacaatagtcacattttgcgtgggtgttttttgtttcttttctatttaaaatttttttctttatttgtttttctggtaagggaactagaatctggagtcttatgcaagctaggcaagcattctacctctgagctattgccccaggctaggatgatctttctacaacggaagtttaatccttcactggtcccccagaggcatccatactatttattccaagtaacggcaagcctccttagctggacacacgaaggcctttatgaactttatgtctccagcagatatgtttatttttatatttttatttctcctgttttaaaatttaatttttgagaaagtctctatgaagcccaggctgcccacaaagccattatgtaacccaggaagcccaggcttcccacaaagccattatgtagtccaggatagcctcctccttcagctcccacacgctgggattacagctatgtgccaccatgcctaagtttcccaatacatctttcaaactcttagaattcaacatgaaaacagcctgattttaaaatgggcaatggacttgaataaatatttctaaataaaatacaaataactaatcagaacacaagtaggtgctctatactgttagtcattagggaaatgctaaccagaggcttaatgagattgcatgtcacacgatttaggatgcctattatcagaaaaaatgcaaagtaccaggtcactctgtttgagtacctgtcccctctaaaactactgttggaacttaactgctactggaacagtaccaagagtcaagacagtaccaagaggtgaccaaggcatgtggctgtgctctcttgattgagttgatgtacttgctacagaaactgagtgaattaagcctccaggctggccagtttttttgtcaacttgacacaagcagaccgtttggggagagggaacctcggttgagaaaatgcccccaccagattgacctgtgggcagtaccaccctgggctggtggtcccagatgctacaaggaagcaatctgagcaagccacgagaacaaacgaaatttctcctcggcttctgcttcggttccttcctccagttccctgccttgagttcctgccctgacttcccttcatagtggactgtgatcaagtcatgtcagctgaaataaaccctttcccccccaagttgcttttggctggcgatggtgttttaacacagtcctagaaaaccctaagacagaaattagtaccaggggtatagtcatgtgtggtattgctgtgacatgccggtggcatggtgttctggggagaacaggtggcatttggacttggggctggagagccaacgagtcctcagaactcagtaaactgttctgtgggaattcagaggataatgctgagagcagtacagatgagagatgtctgctttgtgacattccagagtgaagttctgttgttgttgttgttgttgttgtttgcttggatttttttttagtttgttttgttttttaagacagggtttctctgtgtagccctgaatgtcctggaactggcgttgtagaccaggctagcctcttcctcctgagtgctgggattaaagagatgcaccaccacacactcagctcagagggaaattaagagtcccttaaaaatgcttttggtgaagaagaaaaaaaaaagggcagtaatggttcatgcttttaatcccaacactcaggaggcagaggcaggtggatctctgtaagtttgaggccagcatagtcttcagagaaaccctgtcttgaaaaacaaaacaaaaaaacatgtttgagccattctatattttgaatgaagaaccactaaagtgaaacctttgactttctaggacaattgatactggttacctgaggctgagaaattagcagtgattacagagaccatcatcatccatagaaaaccttctgggaagtgtttctaagggccagcacacagaagctgtggtccagagcaggccaaggctctaccttgtgctggtggccaaacttaccaacatgtaagagtctcccaaatggtttctggtttttaaaggcatgaaggtgttgttggacagtggtgacacacgcctttcgtcccagcatttggaaggcagaggcaggtagatctctaagtctgaggccagcttggtctatagagtgagttccaggacagtcagggctattcagagaaaccctgtctcaaaaaataaaaaatgaaggatttatggaaagcagctgaggcttggcatcgtgagaggtcagaaggggccactagtgaaggtgcagcctcagttgcagtggagagatttctggtattttgttttgttttttcaagacagtttttctgtgtagctttggagcttatcctggcactcgctctggagaccaggctggcctcgaactcacagagatccacctgcctctgcctcccgagtgctgggattaaaggcgtgcaccaccgatgcccagcaagatttctgacattttaatgaaacttaatttttaaagtattttaattttttaaagactgtagaactttgaaaagttggagtgttttatattgtgatattaatattagcatgccatattagggacaaataggaaagaaaatattgagtggtgatgtgatttgtgtcaggttaacaaggggtggattgtgttgactagttttatgtcagtttacacaaactgagtcatttgtgaaggagaacttcaactgagaaaatgcccccaccagactggcctgtgtgcaagcttgtgggacattttcttgactgatgattgaataaagaggggccaggtggtaccacccacgactggtggtcctgggttctataagaaagcagtctgagcaagacacagtgagcaagccataagcagctctcctccatggcctctgcatcagctcctgcctccaagttcctgccctgttggagttcctgtcctgatttccctttgtgatggactgtggctaggatatgcaaggtgaaataaaaccattcctccccaagctgcttttgatcatggtctttcatcacaaccatagttaaacagcctcctcctcttagcttctcttctctctttctctctcttctctcatccccctccttccctcttgctgtctaccatggagtacagagcaagaaggctcttgtcatgtgctggtgatttgatcttaaacttccaatccctagaactttcatgaaataaactccagttctctataatgtagccaatattttgttataggagcatagacaaataatgtagagtatatgggtgtagaaaattaagaaacccttatgagccgggcgttggtggcacacgcctttaatcccagcacttgggaggtagaggcacgtggatctctgtgagttcgagaccagcctggtctacaagagctagttccaggacagcctccaaagccacagagaaaccctgtctcgaaaaaccaaaaaaaaaaaaaaaaaaaaaagaaagaaagaaagaaacccttgtgaattgcttctgggaatataaaatggtacagctgcgataaaaaaaaaaaaaaaaaaaaaaaacagtatggcaactcctcaaaaatgtaaacatttcatttctagtgctccaacaattctgactcaaaatcagggattagaatttccaacagtcaaaagacagaaacagtctaagtattcatagtcaaatgggtaaacaaaatgtcgtatgcacacacacacagtgaagtatcattcagtcttaaaaagaaggggactttgaaccttgaagaccatcacacttagtgatgataaaaggcggacacaaaaggacaaacactgtgtgacttgacttatgtgacgcctatcagactcccattgacagaagacataacaatgcttcccaagagacaaaagaggaagaaaagaggattcgtgtgggataaggaacagttctgggatggaggtggtgatgcacagcattaagaatgcatttaaaatcactgaactgtacacttaaaaatgggtggggcagcttgaaaggggcctaatttaaacaaaggttaaaaagaattaaccatgtggttttctaaaggccctatggctgcatatacttattaatacacacaaagagcctgagttaaacacttcaaggtgaattgaatgatagactataccttagtaaaaccgttatttaagagaggaagaggccttataattctttgattgacagagagcactaatatataggaaagcatttctattattctaatacagtatgttttatacagacaaaatattgaacaattaaaaataaaaatttcaagtacttaatgcaagttttcttccagaaaattcccagcaatacgtttacattttaacaaaagcaatccattttattgcagcaatatacatactggtaagcttaaatttatgtatccttgaaaaaagcattttctttggcaacatcataacagccctagggtaaatatccagacatttatttcccctccaagtaattccaatataaaaatgtttgcttaaaattctgaagagaaataatgttaacttagcactatcccaaaacttcccaactctaggataagttcctttttccatggtaattaaatttaatgattgatcagaaaatctgtatgcatgactactttaatggtatgattcattttaaaaacactggtatagtgccagagagatgcttcatcaggtaaaggtactgtggccaagtttgacctcctattcccagaaacctcatgaaaaaaccaactccagcaagtgtcctctaacctctatgtgccctacccccaaataaataaataaataaataaatgcaaaaaggataggacagggcagagttgaatgttctaaatattagcctaaatgtgtggccattatttcatgcctttctagcctctgttggcaatttccatgaagctaaaactgtatgtatgtctgtttaaggctgcaagataccctggaactgaaattacaggcagttgtgagcggccatgtgggtgctgggaatcgaacccaggactcgggaagagcatccagggttcccaactgctaagccaatttctctagttccatcaaaaactacctggcaatattcaacatcttttcatggttaaaacattctgaaaacctggaatttcttagcattctccagcacaatcgggggccttatgaaaaccccagagctgagatcagacttgctggtgaaaggtatcccgggaactagtatggacaggactatctactgtatatcaacctgacacacaagctgtaagtgaacttctattttctaaggttactctgacccaagtttacagcacagaagccaaaagcaagcagcttgggaaataccacagaaacagcctgaggttagaaggtctttttactttctgttttatgtttttactttctgttttattttctcactgtacagtgaggctgaccatcaactaaagcccagctcagtgagccatcttgcttcagtttgagtagctgagcctcacaggcaggtgacagacagcacaggacttgtaaagcaccacagacttattgctgatattctgggccagtgtcctcttggcaacacaagcttattgctgatattctaggccagtgtcctcttgtgatagtctgttttaaaatttgctgactttttatgttttttaataatttatttaattttatgtgcactggtgtaaaggtatcagatcccttggaactggagttacagacagctgtgaactgtcatgtggatgctgggaattgaacctggatcctctagaagaatagccagtgctcttaaccactgagccatctctccagccccaatttactgacgtttttctgtatacttatctagtgatattcttggaaagatttaagagtaagaattgtgaactgggcagaggtggcaaacgcctataaaaccaaaacacgggaggcagaggcaggaggatttcggtgagtttgagaccagcttggtttacagagctagttccagcaaaccaaagcaacacaaagaaatttgtaacaacttagtcatatgaaagaatataactcaaggtattatcaccaatttgcaaaaatggataatcatgtttctctttggccagggatgcagatcactggctaatgtctgcctcatatgcatcagaccctggatttggtccccagtaccacagagaagggggaaacacgcgagtgcgcatacacacacacacacacacacacacacacacacacacacacacacaccagtacttttcaggctaagagtgtaaaaacacttgtttcaaaaagcttgaatacctaagttcaaatctcaacacctgcttcaaaagtcagggatagctctgatcacagttgtaatcccagcactgtgaggggctgagacaggggatcgctgcggcttgttggcaccagactagctccaagtccagtgaaagactctaagaaagtaaggcacaaagtgataaaacaggacaccaacatcctccttgcatctccacatacagacacacaaaaataaaagttttaagtacttcatgtttgtgcaaatgcaacatagtactttggtactgccaggcatggtgatgctctcctcctgagtgatgctcagcactcaggaggctgaggaaaaaggatcactgattttgatgccagcttggaccacagaaagagaggaaaggggttttgactataactaccactaagtaaaaatgtatttaaaaccaaaaaccaaaaaccagacctgtatttaagttcccttcacacacaagacagtctttgtgctttgtgttattgctctctctctctctctctctctctctctctctctctctctgtgtgtgtgtgtgtgtgtgtgtgtgagtgtgtgtgtgtgtgtgtgtgtgtgtgtgtgtgtgtgtgtgtgtgagagagagagagagtgtgagcacccacatgcacacatgtggactccagagggcaacctcacctgttgatcctcaggcacaatctccttttcctagaacagtctctaactgtcctgggactcaagaggcaggctaggctggctgaccagtgagccccagggattcgcttctctttgcctcccccacagtgctaggattataagcctgtgcctagatgcctggctttttaaaaatgtggatcctgggaatcgcactctggtcccttcaagcactttactgacagctatctccccagcccacaaagtcctattttaacttgattcattagtcatgtcaataaacaatgccataattcataagtttgctctagaaataaccaacttcttgctacagaaaatgtttgaagtataactttaccatatatgagaactgattgataatggaagtacacctatttagttcacgattatatctaatttagtgccggaaatattacattgattaaataaagttaaaactgtagtgcttgagttttcaataaactgcatgcaatttgctgagcttaaagggcaatattaacaattatttattaataatatgttaataataaaatgacatgctcagcaaatgttctaggaaacgttactttacatggagtgcccatttccaaaagagagagagagagagagagagagagagagagagagagaggggagagtgatgggccatctgtgaacctatgatggtcagatgctaaaacaacgccagaaacaccagttagcataaccactgcagcatagcatagttcatttaggactgttctatacaacttagtatactgttcgctgtcagaagacttatttattttggtaaaataaggatctgagtacatttaatgttaacacagtttcagttcctgccactctccactttacatgcattcttctgggaatttattctatactaattcttacatgttcattttagaatggttagcctttgtattaacttaaacagtttttcttttctcaaaatagttttctttcatcttcattcttttcggacatccaggatccaaatactactactatttagaaggaatccttactgtataaaactctgaaagaaaatggtaactacttctcaccagataagacaaataagatagataagccttctccaggcttttggtgggaatagagaagtatatgatctaggctggagggtcagatgttttggggaaggattctgaatctttttattttatttatttgtttgtttatttttggcttttcgagacaggttttctctgtgtagttttggagcctgtcctgacactctatagaccaggttggcctggaactcagagatccacctgcctctgcctcccaagtgctgtgactaaaggcatgcactaccacctggcagattctgaatcttaaaataattttaaagcccaaatctttaatcccagcacttggaaggcagaagcaggaggatctctgagtacaggaccaatcttgtctacataatgagtaccaggccaggcatggctacagagacattgtctcaaaaaaaaaagagagagataatttttaaatgtagagacaaaattattttggggaatgatggaggcagtaagagcaggtattttctggcagtggtcaagggacaagggtctgtcttgaagcatgccatcagctgtggtgcatgttggatctcttctgttctcatctaagctggttctgtggctttctgatgttttggggggctccttgctaccttcccataaacccttcccttccgcattaaccagaatcagtactgtttgactgatcaactgtgggctcaaggaagctagaactctcgatagagccaacacagacttaagtggggggacactactgagaatccgggagattgagtgggtcaatacaatgagggagtcaagatttcaaagtggctcacagagttgaacatgaaggtagaattgctgagaagagacacaatgacacccacaactcttataaggaaaacatttaattggggactggattacagttcagaggtttagcccattattactatggcgggacatggaagcatgcaggctgacatggtgatggagaagtactgagagttctacatcttgatccacaggcaacaggaagtgaactgtgtcactgggcatagcttgagcataggagacctcaaagcccatccccacagtgacacatttcctccaacaaggccacgcctcctaatagttctactccctatgggggccattttcttttaaaccactacaaagatgaacataaactcagcacatttatttgctcttgtttcatctccactacctccccggaaaccaaacacaaaccccaaaaaaagtttctacaaaatgctgaaaatgaagtcagcatggggatgcacacctttaatctcagcactcagaaggcagaggcaggaggatatctgtgagttcgaggccatcctgatctacacagaaaattctaggacagcctggtccaaccagagagaaaaatgctgaaaaggagcaaagtagaagtgacagtcacaagagttaaagagtctatgacatgagtgtgctgggcaaagtttacatggtcactgaaatgactactgaagtcacccaaaaggatgatgggattcagagtgaaaaaaattaacaaagaaatgacagtctttgatcaaccgaagtaagctagagagacactgaaaaaagtgacagtacaaagagtgacagagccggggcattggtgccccacacctttaatcccagcactcaggaggcagaggcaggaggatctctgtgagttcaagaccagactggtttacagagcgagttccagaacaggctccaaagccacagagaaaccctgtcctgaaaaaaaaatatttaaatgaaggtacaaaaaaaaaaaaagaatctctattacgatgaagagcaatgattttgaattgaattgtactataatagtgcataaatgtaatctcagaactggggaggccaggcaagaggattacaagtttcacattagcctgtactacacagtaaaagcctggctcaaaaacaatattaaaaatgttttaattgggccaggcagtaatggcacacacctttagttccagcatttgggacgctgaggcaggcggatctctgtgagttcaagatcagcttggtctacagagcgagttccaggacagtcaaagctaaacagtgaacccttgtctttaaaaaaaattttttttaattggaagtaaaacgactaacttatgatcttgaattaaaggagacagaggaggatgaatagcttccttcaagatgaccaacagtggaccccagaagagaatgctagagcaaaacaaagagatgagatgaaggttttataaaatgagtatttgcaaaaaagttcattggtgttagaaaaaacctgaggcttcaaagagtccatgaaaagtcttaagggtggatgagaaaacagagtgatgaaaggccagctatgtagagaacggaagattagaaaagaagtagaccagagatagccaaaaataaaatggaagttcggcagcttgctctttccctttgagtcccaggttttaaaacgtccccaatatttgcacagctcatttttatgaaccactggctcttgggtgtctcttcccttgcccccttttagtcgatgtgatgtctttatgggtgttaatctttgccatcaaatactgggtggtgagggataaatcactggtgtcttaatgttataggactgcagacttaagaacagctgttctcaaggagctgttgagtggccgctgcaagaacctcacactgacttcattttggtttgacagtcttgacttttgagcacgtgatcaatggacgataggccatgaatcgggtcctgggaaactgagtttatgtcgggctgacacctcacttgtgtcagcaggaaacggtgaagccctggcatcgctgctttcattgtgtgtccatctccttcaaaggaaaaagaaaggaaaggggggaagcctgagacctcctgccaatagccataccatgagctccagagttacaccagagccttcgccagaaacacttcaccaaaccacgtccagaagctgtgtaaggaaaatgtttgtagatcgaagcctgttgaggtgtggtaaccaggtggctattagtaggtaactaagacaagaactgtgtctaatttatttgcttccaaaatattcgttgcttaaatttttcctgagtttgattagctttcctttaccattctcatccaaatgtttttaattttataagtaatctgaagtttgaaaaattattttgtaggtagtagtaaaaaaagcctgtcctcactaaaaaaaattcaccgagttctatggttcctgttgtccccaccttacgagaaacttggtccaaatgagcttaagataaacagggctggcttccaccttgtcatagtatgctattttactgtaaacagctgttataaatttgaaagaaaaattctcatttctgaaaaaatttatcaagcctaaaaacagtgcacagccacagacatgtctataaaaagatgtctgtcaactgtatcttatactttggaggaaagcttgttgcagttttcagctcagtggcagctattcccaagggattttttttagagtggtgtaaaaacacagtcatgaaatgttaaaggtcttccacaaaccaactgatttctccaatgattcaataactcccaaaagtcagcttagcagctttctttacattctctactatgaaatacagcaaacccttcctttaaaggctggaactatggccgggcattggtggcccacacctttaatcccagcactcgggaggcagaggcaggaggatctctgtgagttcgaggccagcctggtctccagagcaagtgccaggataggctccaaagctacacagagaaaccctgtctcggaaaacaaaacaaaacaaacaaaaaaaaaggttgaaactatgataataatatgaagaaaaggcatagagccaggtagtggtggcgcacgcctttattcccagcaggtggatctctatgagtttgaggccagcctggtctacagattaaatttcaagacaggtactaaacagagaaaccctgtcttgaaaaacaaaaaggcatgatttcattatggatatttgtttactgacaattctatctcagtaatacaaagatttgaaatagccaacaagcccgggcgtagtggcacatacctgtagtcagcacttgagagactgcaacagaagggtcactcatttgagggcaaccccggccttaaattccagtccatcccaacctatttagggagaacttgtccctcaaacaataaagctagaactaaataagcaggaaatagtaaaatgctgccaaacaagcccttatcccattagctaatacttacacatgaaaggggaaaactaaactcaaaggcttcacttctaataatttagaaataaagggaccagaccctcactcagctttagcagccatgacaggctatagaaaaagacacataggcctctgacacaaggaaactctagattctctggcctcctggagcctagggccaaaactaaacacaaagaaactccagacccctcctaggtacttggttcctgggaagtgtttggccacaaaagaaactccagggaagaccaaaatctccactatagtctccaggatacagtactgaaaactattggtatctatgaacaacaggccacctgcaagtaacaagacaaagccagagaccacagaatgttccctttcagcactgaccaatgagaatacctggtacacaggtatttcatgccaaaatatgactttgacaaatttcttgattgttccccaaatgtcaaccaacccgtacctactgaggtatcctgtaacttttgtctttaaaacctagcagtagacagggaacttcaccccctctggaggctgcttcctcagcttgctagacggggtccctccctcggtgtaggatacacaatttaataaatcttatgcatttgcatcagtggtctgtctccctggtctctttggggatccttgtgacttgggcacaacacacacattttatttgttccttgaaacaaagtcttgttatgtaggtcagtatgacctagaactctctgtgtagtccaggcttgcctcaaacttaacatccttctgcctcagtttcctaagtactgggaatataaatttaaactgccatgccttgatagggggtaaatattaagcttaattccaaaggaagacattagtgttagtctacacagagagcaatcataaccaaatagaaagtccaatcaccaaagggtacaggagagtttgaaatgagaatgcatctgaggtttttctgatactgaggtatcggtgtacatagtcaaacatttaaccaggtgttcaaaactctaacctgcagaaatgaagacaagataataagtcccaagagaagcatttgccatgagagccatttaaagtatgcaacacagaaggcaaagaaatgccctcaaggttaattaactggaaagtatgttactgtcctgcttgactcaagtaatgccagcctctgttctagacacacactgtttaaaaacagccaaggaactaattcttgtctgtgtggaggcggaagtttttagtgattcatattttatgaataactttatccaaagagaatatatcaccaaacacgcagccaaaaatatcataagtcacacatcatctagttttctacattgtgcttttatatgaaatgtttattgagtgttggataaagttcagtggtaagagcactagcctagcatgcttgaggccctgggttcaatccttagagctcacacacatacacaaagtattaatcatccacttatagtagagcctatctaatttaaaagatagactataataaattctaacggatcaatgctaaaactcagcagggagcaaatgattctgtagaaatgcctagcagcctccacctcggccctgaggataggccctagaaactcagtctaactcatactagagatcccagaattcaactccaatcccaagaaatctagacttactagactaaaatcctgtcaattctgttaccacctgtcctagtttggtttctgaccaaaagagatgtggggatttggattacaaacctggggtcacagtccattgagagaagctaaggcacagctacagaggcagggactaaatggggcagaggccatagagaaacaccgcctcctggctgactcctcaaggcttgctcagcctgccttcttacagcactcaggtccacctggccatgagggcgccacccacagtgagctggcgcatatcaaccgtcaatgaagaaaacggaccacaggtttgccctcttcccaaaggatgctagcctgtatcaagttgatataataacttgccagctgtaacgtacttaatggtatttaataaagacctttaaaatcttctctaaaaatttatataataaaaagttaagggtcaagataatttgcatgaaacatatagatgggtagactcactaataatatttgaacccaagacacccaaaacatcccatactttgtgtttctcatcaaacccacatttaaattatgctgggtaaaataataaaattttctcagagagaatggggacatatgaggaggaatgaccgatagacactaagccaccattacataggtacaagctctggtgtgccaccacacaggacagtgattacagcatgaactgtatatttcaaacagctaagaggaaggagcttgaggtcactgcaacaaatggaccaggagacagacataactgacctctgaaggcaggagctgaactgcgctgtccctattttaaacagtccaatggcttcctcttgatctgggagaaagctaccctgtggcctggtttcaaggagagacgcctctgctgtatacctcatttcacattcagtcaccctctccttccaggtccagccacacttgcctgcttagttcctctatgaagccattttcctttctggcttagggcttttatgagttttggttttgttttgcttcaagcttttgaatttcagccaactgcttttcagcagagggaaatgtcaaactgaaagcccctgaaggaaggaaaaattacattggtgttcctctgctgcagcattgaagtttttgaacaatttattccatatgtaattaaataattacataattctgcaacagttctcttaacagtaagtaatcacaaagaggacaaggcccacatcttttatgcctcgtggagcacagtgctaatacaggaagcacttttatagaactcttactacacaagattcttgctacatgttctgtcactgaatgaagcagatctgttactcatgtgacatgtgaagaaataagaatcctggggttcccaactcataaattttactacagagtttatgttctgagctactaacgagtgtaggatgaagacataatacatgcccaagctagaatgttactggtaagactaacaaataagccaggcactggtggctcacgcctttaatcccagcactcaggaggaagaggcaggtgggtctcttaagttgaggccagcttagtctatagagtgagttctgggacagccagagctacacagagaaacctgtcttgaaaaacaaaactaacagccaggtggtggtggcccgagcctttaagtcctgcacttgggaggcagagacaggcagatctctgtgagttcgaggccagcctggtctccagagcaagtgccaggataggctccaaagctacacagaaaaatcctgtctcgaaaaacaaaaaacaaaaagaatacttattcagataatcagcttttcagcaggataaatgaaacaagtaaattagctagttaagagacatagatgaagaggggctaagggagtgactctcttagtggcctgcttgcctagtctgggttggctttcccagcactgcataaactaaaactaaggaaagtggaatgtgcttgaaatattagcaattggaggacagaggcaggaggatgagactgtcaaggtcatccttggctatgcatcaaattcaaggacagcccaggatatataagagcctgttgaaaagaaagagacacactgactgactgactgactgactggctaaaaaagtctgcattctgcattttatggcttatcatttccctgccatataagaagctggctccagccaggtgatgatggcacatgcctttaatgccagcactcaggagacagaggtaggcagatctgccccccaccccccccaaaaaaaagagggaaagaaaagaaaaaaaactggctctaaggagatatgaaaacagtagcaatattaggaacctataaatttctagtgatgggaaccctgtctgagctaatcactgttgacaataaaacaaagaaacctaaggtactgctcagatcaaatgcaaccaaagaggtcagccaactgtatgcaatgtggggttctcggctgaaacctatactggaagaaatgcaataacaggcattattgactactgaaaaaattgaagacagaagtgtgccatctactatgaaagatgataaccatcctatggcacaccatcccctaccatcagttatgccagcaatcttcaagtcctgtctttaaataaaaggatctgaagggtagagaagggtaaacttttagcttttcttcttgtttagtgacctaaaacagtaagaacagctattaaatggcctcagaaatatgcacaaatgctttatgtatgatagactgttttgatcaacaacaggacttaggtttgtttttcctaccctcagatttcatgtcaagcacataccagtaattaccaggccctcaatgcaaggtgctttccaccctctcactattctcacgccaggcattgtgggtgctggggacatcatggggaaaaagaagagatcatccacaaggagtgaggtgcatatctttatttaatccccacactggggaggcagaggcaggcaggcagagctctgtgaagatctctagactagcctggtctcatagtgagctctatgataggcaggactacacagagagagccagtctcgaaaggagaagtcaccatcctcatcacaacataaacagtataattctctttgctttatatttgaggaatctgaggatccttaggtttagcacctaggctaagatcagatggttgtagcttgggaaagatagcatacaaatccaggtgtccttccaagtctcacctttgctaactgtactatcccacagtctcccccccccctttttattgaaattagaaacaagcttcatttacatgtcaatcccagttccccttcccaccctcctcccctgcccactccctttctgctccctagggagagagaggccttccatgggggatcttcaaagtctgtcaaatcatttggaatagatcctcccctgtgtgtctaggctgagagagtatccctctatgtggaatgtatcccacagtatttagcatataaccaacagttactaagaaaaaatatgtacacacatatataagttcacttttatttctccatttcctctatttcaatttggatttcttttttttcagtcggtgtgtgtgtgtgtgtgtgtgtgtgtgtgtgtgtgtgtgtgtaaacatgtattaatatctatgcaactatgtgcatgtgtggagaccagaaaaagtcactggtatcctgcatcacaccctgccttaatctcttcagacaagtcagagtctctcactgaatctggaactaggctggtagccagcaagccccagggatcctcctgtctctgcccccagttttacatggccatgcagcaatggcctgcttttctcatgggtcctgggaagcaaactgaggtcctcctgcttgtccagcaagaactcttacccatgcatctcaattttgatttataaatgttttggtttcagaatggtaccacatgaagaattttaaaaaaccaaacaacaaaaaacatgtaaaaaacctcctccataattgaattagagtcatttttccaagtaatgttattggagggtacaaaatatcaaataaataatttagtacagacaaaaaaataaatttgaaagggaatttgttggaaaaactgacacactccttcaaaagctcactggtctgccaaagttagaattctacacctaagcagttggtttcctggacgtagttctaattacaaacagaagatcctgcagtactgtgtaaaattctccaggagacatgaacaatgggattaaaagatccaataaattgacaactgcatgtgttacccatttaaacaaacagaacaaaccggaaggaaaaaaatccaaacaaaaacgctgaggaaacttcaaagaaatgataaaacttaaaagagatttttttcatatcatatttcaaacattctttcagtacaaaaaaaagatgaatgacttaaaattgactttgttttaaatttctaaattcatatgctttttagctagagaaaaaaattaggaaaaagtaaattacactgtccaaacacaaaataagctacagagaagcataactacatcaacacatacataaccacatagaaaggtttttccaagcaatttttccctccctcccccctccccagacagggtttctctgtattgctttggaggctttcctggaactcattctgtagaccaggatggccttgaactcacagagatctgactgcctctgcctcctacaggcctttagtctctgctgggactaaaggtgtgcaccaccaacgcccattttagcaattcttcatcttaattatccactttactggacagagacacagcacacctctcaatgtgtctcagggctttcccagggacaactggatcttgagggcactaacctaatccatttatagattcaaaactttgaacagaactataaaaggtaaggtctcttgaatgaaaaaggatgctggggtgtgtcctggggggggggtgtcttatcttggccctggctccttcctattgctcctcttggcatgttttccagctgttatgtttctaatctcccttactgatgaggccatagagagggcaaagccaatgccttcctcatcttcttagtcacttaagttctgacttcacctaaggctaaagttaacctgcaagccccacttgcccaaggacagaacacttcctggaatgctgggggctgttgtccttgtaagataacaagtcacatattttcacttcaataaacaaggttggttgccccatctgcacaggatgtgtttgatcagagagaggctggagatttacctaggcaggaaataggacagggtgtatgtttgcccccattggccaaaggtggaaagtacagtggccttgtgggtttggcctttataggcacctgactgacctgatttcagcaccatttctctgggaatcctgaatacagacctggctagtctccaccttcctggtcagtatttaatagagcttgcttcagttggacaatcacaggtttggtcttctcaaaattctccagtttaatactaactttccatcaaacaagcattaaatatacaagaactttaatatatatgaaattcagctttcaacagccactacttaacttgtacagttgcagacagaactgtttcttcctctaaatgtattttaagctgaaaaatatgctttgttaactaaagaatcaggaattcattctctttctctctctctctctctctctctctctctctctctctctctctctctctctctctctctctctccctccttccctccctccctctctctagggctaaaaatcagactgggcatactcctttaatcacatcactgagttctacaaaccaatcaggggcacaaggtaaataaaagaatatattttcttgcattgtaaaaactggcagtatatgccaatgctcccctaagcaagtcttttttaaaaaatgtaatttatctcctaatagttctttttcccttttattttctttggggggggggtaaataagaatctaattaaataaaagggaaagcttttttatgtgaaaatttttttcatatattattttggtcatattctttcacctccctgatcctccctacccccctactcaacaactatcatattcttaaaaaaaaaaaaaaaaaaaaaaagtacatggacatttttcttaagagtgttcctttcacttctaaagcagtaacacaaaaccttaataccttaatagggttaaacctgtactacaatcccggcttctgagattaattttatcatgtataaatctcaatttccagttatcaataaacagatctctggcagtctcacagtttccctgctgcttttctgcggtcaccatgacgatggactaaacacctcatgtaaatattagttaactactttgttccaaactgagagtggaggagggtcgatatggtgcgttgtgaaaactcaaaaaaactgcaacaaagatggagcgtgaccttccctccacgaatatttgccctttactatcttagggcttgctttatgtatttatttactgatttatggagcggtgatttcggtcaattgtggtgtaattgctgttgggtcactggacgctaaccacggacccgattttaagtcacgctgctgggttagaagccaactcaaagggtctagcagttcaacgcggatcgtcgcttttcggggtccccggaggcctcgcgggtcactgcagccgcctcggtcggtccccagcacgcgcggggaacccggcgggtccgggcggccccgacgggtccccggctgggttttcctttccgttcttattataaagcggttatttgggcatctcttcctttaagcgaggttctggcgacacccgggcgagcacggcccggtgtgacctcgaggcctcgctctgccgcctggcggaggaggcaacatggaggcggccggcgcctggggccgggccgggcgtggctacggcgcgaccgcagaggctcccgcccggttccggcgccggctcgcgtccgccgtgaggccggcctccgggtccccacagtcccgggcgcggcgggcgtggaggccccgggaacaaggacgccattatgaaggtcccctgcggctgccacggccgcagcccgcgcggacctcagccgggggatgggagggcgcggcgggcggggcggaggggccgcggggcggagccgacggcggggacgcgggctggcgccgctcctcggcccccgtctgcccgccgcgccgcgccgccccgcgccgccgaggggctcaagatggaggccccggcagcgttcctacctgtgccttcccgttccttctcctccgccatcttggtgcggagcccgtcgcctgggagatgcccatcacaagccctgcggggcgcgcgagcccggcctgcgggagggagcccctcggcgcgcgggggtcctcccgcttccgcccggggcccgctccgctcccccagcccagccccggggtcttgcggcctaggggagtcgtttattaataaagttccggagcccgccttggcctgtttgtgaccgtcctgagagttcaagcgctgcgcgctccccctcgggggacggggctgcctcgtttgtgtgcttatttgtttatttacttatttatttatttacttatttgcggtttctgctgcttcggtttggttttgtattgtttttgcgcagagctcgcgtgcagagcgcggcttctccccggcccattcacaaccgtaaggccgctcgcccgctgccctccctcccgctcgcccgccagccaggcccggtgcgtcccctgggtcgccctctaagcggagccactgcgcagcccagggaaactggagcgaaaacggacgtgggccgctgccggaggaagccagcaggcctctctccgggatcgcgagagagggctcgctgtaggaaaacacgtgcaaaataggcgcaaaacactgcgtcgtcaaggctgcaatgtctggtacaaaatagtgttctcatagcaacgaataaattgccggtctgttctcagtattacacacattgataggttgatggtgcagtttggcgtgaccttccagggagagttttgaatcctatgttcctgaggaacttggctgtagtgttttgttattttatgggtaagcttgatatatttggatgttttctttttaaaaaaaaaagtattaaaatgtctttaacaatgtggctcagatgaataactagttttaatccttaatgatatttcagggcatgtgtactcatttaaaaatttattataaaaataacaactaaatgttaaggcttttaaaatgcaagatattagtatttaaatttggggagggggaagggaggttcgagacgggctttctctcagtgtggctttggaggctgtcctggaactagcttttgtagaccaggctgatctcgaactcaacagagatcagcctgcctctgctcctgagtgctgggattaaaggcatgcacaccgccaggctgtatttaattttgtgttactggtttttcttaactgaacttctgtaaacagagtgcaatgaaccttcaaagcaggccaagcaagtgtggggagaaagagaaccggccattcctgattgcagaggatcctaaatgttgcctgctccctaagtctttctccacctcttcctcagtggttccatagttccacaagctcttggaatggtttatagtgcttttatttatttgtttctaccacataagtttctagcgaataaagttgtgttatacaatgggacattctgtctggaaattgtcttgtatgtctgtgtctatatgtgagaaagagtgtatatgtgtctgtgtgtgagaaagaaagtgtgagtatgtgtctgtgtgtgtgagcgtgcatctatctgtgtgtgtatgtaagtgtgtgtgtgtgtgtgtgtgtgtgtgtgtgtgtgtgtgtgtgtgtgtgtggtttgtatctttgttttagatgtaagaggagacattctctctacgtgcccaggctgttcttaaattccaggactcaagcaatcctcctgtttcagctttgaggaatacttagaactccagatataattttaaaaattgtaattataacacccacatctagccaggcgttggtggtgcatgcctttaatcccaacactcggaaggcagaggcggatggatctctgtgagttggagaccagcctggtctacagagcaagtgccaggataggcttcaaagcttcacagagaaaccccatctcaaaacaccaaaaagaaaaaaaacaaaataacacaaacatctaatctgaaataatagaggtattaaaaatgaagacaagttattgttctccatgactgttccaagaggctcagattcagtgaacttactgtaagatgaattttccttttgcatatgtttatatcagtgaaagtaatagtaacacatagtaaataaaatgagatccttatacaagcatttgaacacatatccagttaacattttaaaagttgaacagatttctctacaacccccttccaatattttgtacagtctactaaactagctaataaagtattttatttaagttatttgaaagtgtattgctctacacttctttgaattcctctcaaatatttaaaacaatatcatcaaatcagtggtggaagatcacacttatagtctcaggagacagaagcagagggatcaggagttcaaggtcatcttcatctggtggtgagttcaaggtggttggaaagggtactcagcagtaaagcctgctcgctgctctaaagctctgggttcgatcccccaacaccagtaaaaagagaccatgacaaaaaaggcttgaatgggctacatgagaccctgtctccaaaaccctaaaataattaactaataaactgttgggctaggtttggcaattcatgcctagagtcacagcacttggaaagccgggacaagatttctgcaagtttaaggttagcctggactacatactaagaccctatatcaaaaattcaaatttttaaaaagtatgttagctaacacttcccctgcaagtttaaagccaagagacagatcttacccatgggcacagtacaattattctccaaatgaaatacaagtttattccctgaggactagttttcatggtacaagaaggggtcgtactgttagacccccgaaaactcaagtatccgaggtcccaggccacgtttgcggtcaccccaatcaccaggcggattcgagagcttgctgcaaactgcacgaggctttattgtaatttaacgagctaaccccatgttagctcgggtctttcacccacccaccatggcggatggctagaaaagacggctcctaggggctcccaagagatcttataggacagcgtaaggggagtgtctaggggtacacataggctcaggattggtgtgcctccaggcttggagggcttgccctgtgttgattggtcaactggttgttatggcccataggccctcccagggtggttgctatgctctctacgtcattgctgtgcgcttgtctgtaaagcacacccagggtcgtaaagcacagcgccaccagctaacttctgattggttccttgtcatgaggcaggcatctgacctctaagtgaccaaggcaggtttatggcaagcatgtgttctgccattatggctgccaaaagggaagctggtcccttcagtacaagcttccaaagaagcttgtaaccaacaaacaaagaagagtaaccaacaaacctactttgctatgatcctatgaaccctaaccagctgtcactgtgtgacagcctaagagtgcagtagtgccatgcacacctgggtggtaaccagctgttctcatgcacacctgggtagtgaccagctgctctctaattaggcttaaggcccactcagcaagagggaaaaccatgcttggtactggaatcctagccaactaccccgagctaccgaagtcataagtcttggagaactgaggtggtttgaataggaatggccccctaggcgcgaatatttagatgcttattcattagggagaggtgctattagacagggattgggaggagtggtgttttgaataggtatggtactcataagactcacgtgtttgaatgtttggtccataaggagtggcactattaggagatatggccttgttggagtaggtgtagtcttgttggaggaagtgtgtcactgtttttgaggtctcatctatgctcaagccatgcccagtgtgacagttcacttccacagttgcctgtggatcaagatgtagaactctctgctacctctccagcactaactatgtcagcctgcaggctgcctcacttcccaccatgacggtcatggactaaacctctgaaactgtaagccagccccaattaaatgttttcctttgtaagagttgtcctggtgtctcttcatagcaatagaacattgataaagccaggaacctttgaaaagttttaaagggcttgcaaggaaatccactgttgtaagtggatttcatataggaagagacatgggaaactaaaccccatctctgtcctgagattcatcttctactcagagagtctgcttttccaatagtttacatgcacacgagggattgactaacgccacagtgctcaccaaggctgcaacctgctccctgtacaatatgaagcctattttatttgacgccattggctatctttcatctggctcttggtgcccaccttgacattatagcagatacgccctttcccatgtccctggagctccaaacacaggacaatgagaaaggggcatctacgaccctggtctaattccagattctgaattgtgggcacaccccttccctggatgactgatgccaagaatgtccatgtcaccccactgataggtcagaagtctgaccctgtgatctcaaagaaaaagtcttaccagatgacatcagagaaaactaggtgtatcgtgagtatatcacgtgagtgtgcacacaggaccatatactcaaatcaacaccgtaaggactggattcgtgacagagctataagttaaaaatagttcttttctggctggagatgtcccagagttggtgtaatgcctacctcacacggacaaagctctgaattcaatccctaacatcctataaagcaggtatggtagtgtgtgaacactaggaaagtagaggcatgggggtcaggagtgcaagatcatccttgaaattcaaggccagccatgactatacgagaccctatcaagattcttaattaaactgtgcgaaatacttcgtatacaatatgtcttttaatctttatgaggttgttcatgctcctgttttacaggtgaaagacatctttatatgaatggtatgcttacggtatcgtaggtagttaggtgtgtagtgtagattacagctcatctggggtctacttctctttgatgactgtgctattgggagaccccacttagtaatcagaatacttaagaagaatgttaaacacaaaaattttccatggaattagtcacctctcctgtgctttttttgttttgtttttccttttttaaatgtacgtcaaaacatgaagcaaagcatctggcagaatctcttagagacattaaaggaagcagacaggggtgtgctccttgtcctgtctggacagacgatgatttaaactaaaggcctggccagacgctggctcctctctcctccccacctggctgctgactgagatttcaggcctctgtcatgaaggaagactgaaagttgtagccctggacaagagcagtttcagaggcagaggtagcttcaatgttcggagacagtggacacgggaagccaggatagcttgaaagcaagccttacaggaaccacagactacaggagcagccacacccctagcctttctcccaaagcaaggctctttctgcttctctttaaaacacacatcgacacagaaaatggctgtttaattcattgcttacacagctccagtaagcaacacctttcaaggactcttgactaagtctctgtcctttgcgcactgacaatgggacctctgatcccagagctggctgctctgcgtgcacagctcaagtcggtgaagctcagacagacggggagataggtagatgctccccaggagaccagcatccgctgatcctttctttcctccccaaacttgtatgatattttgatcatgttctgacaaagcttgcttggagtcagagggcagatgtagacatctgcggactaaaactaaccacggaggttttggacgactgaggacagataggacaggaagtagtaaggcgggggtgaaaagggatctggctctctggagcaaggaacagaacaggtagggaggactggtggtttctccgcttctctgatctttcaggctcttaccccaatatttgactcctgcatttttattgataaagaatagttagagtaacatttcacaaactcaccgtggctccccactccctccacactataaaacagtaacagtgggactggcaagatggatcagaaggtggtagaggcacacactcctaagcctgatgacctgagttcaatccctgtaactccagtcctggaaggagagaaacgattgctgcaggttgttctctgatctgacctttacaggactacaccatggcacacagcacacacactaccccccacccccccccacacacacaataaaaataatacaattgttttaaagagtaacaataagtctgggggtgtgactcagtagtagaacacttggctggtatttcttatgtttggggtttgatcctcagcattgaaaaaaaaatgaggatgaaagaagaggaggaggaagaggacaagaaagaaaaaagaaaggaaggaaggaaggaaggaagagaagagaagagaagagaagagaagagaagagaagagaagagaagagaagagaaaagagaagcgacgagaagagagagaagaggaataagaagacctctgggctggagagacagctcagagtcaagagcacgcatggctcttccagaggacacgagtttaatccctgacagccacaccaagcagctcacaaccacctgtaactccagccccaagtaatcagaaccctcttctggcttctgtagtcacctgtacacatgtgatacacacacaacctcatacaaaaactacattttttggttttgttttaagaaggtagccatccttaaaaatgaaagggcaggagccaagctatggtggcccacgcctttaatcccagcactccggaggcagaggcaggaggatctctgtgaattcgagaccagcctggtctacaaagctatacacagaaaccctgtcttaaaaccacctcccccccaaaaaaaaaagatttgcagatgttataaaagttctggagtcttagaaaaatctcccaggcatggcctctgactcaaagttcttgactgtctaagatggtaagaaaggtatcctaggcacacatgcacacagcccttcactctgctatcttggggtcaacaagagtatgattaatttttctaccctaaatttatgaattgcataatgtagtccatgagactcttgaaggactaagggataatactttagataatgaaataattcaggtgtgccttgtataatgacagatcccatatattatggtgatcctattatgttaggatcatagcccatatattatggtatgctttgaatatgaaatatccccccaaaaggcttatgtgctggaggcttggtcacagcggtaagaagtctgacgaatatagagctgaaagattcctgtccatgcgtatcatgacatggtaacactagtgtaaataatcccacagcatgacagcagggcaaaggtatagtgaaacaattacgtacagtacataatacttgatgataacatcactggcttgtgtacttactgttattttacagtgtattccaacttataaataagttcactgtgaaacagtgtggattatgtggtattttgaatgagaaatgtgccccataggctcatgcatttaaacatttggttcccaggtagcaagcagtgctgtttggggaggttatggagaaagaaggacaataggggcaggctttgagagttttaagcctggtcccacttcctcttacctctacttcctgtgtgaggataaaaataggacccaccagcttcctgctgcccctgccatgtctagccttgtctgttgccatatgctctatcctgctggaactataatttaaaccaaactcttccttaagttgcttttggtcatggttgtcttagttagagtttccattgctctgaagagacaccatgatcgcagcaactctttttgtttgtttgtttttttaaagattttatttatttattatgtatgcaacattctgcttccatgtatatctgcacactagaagagggcaccagatctcataacagatggttgtgagccaccatgtggttgctgggaattgaactcaggacctctggaagagcagtcggtgctcttaacctctgagccatctctccagcccaaccacagcaactcttataaagaaaaacactcaattgaggttgcagatttcagtttcagaggctcagtccatcgtcatggtgggacatagcagcgtgcaggcagacatggtgctggagaaggagctaagagttccacatcttgcaagcagcaggaaatgaacttagtgtcacactgagcaaagcttgagcaaaagagacctcaaagcccaccccccacaatgacacacttcctccaacaaggccacacatacttcaacaaggccacacctgctaatagtgtccctccctttgggggccattttctttcaagccaccataatggtgtttatcacaacagaaaagtaactaatccaggttctagcaatagaagcagcatacatcttgagtttactttctctcctcctcttcctcctctgtcatctttcttctccaccacagaaaagcaatacaccaatgtcacaacaagatctgaagaaggcacattagacacaatgctaggacagcccagtcatcacacctcaccagatttcttgattgcatcaagatgccacatggagggattatgtccctgtcgttaagcaattcatctgtcgcaatagacagacaaatatatgaatgacgctgtagtgttggagatggattcaaggtctaccccaagcattctacttctgagctcctcacccccctacccaaggacatagaaatgtttgttgctgctgttgtttagatataccccagattggtcttcaatttgatatgcagtcaaaaatcctttggcctccacatcccaggtgctgggcttacagtattcgatcccacgtacactgaatttcttattcactatgtaaaataaacaattggggaataaaaagcgaatttctgtcagacactgtggcactcacctgtaatcccaggtggtggatcaggggtagggtggcaaggtgggtataaaggtataaatttgttgtttgttctttgtttgagacagagtcttactggcctggaacctgctatgctgatcaatcagagatcagtctgcctctaccttcagggttctgggactaaaaacatgtaacaccacacagacaggatcatacattggagggcagcctgggtcacatattgagactgtctctcacacacaataaactggtttgctacagagacaacacagtgtcattctttttatttaaatttaagccaaaaaaggactgaatgccgtactttaccttgactgtgtaagcccaacctatgaacatggtcacttagcaaacaggaatcagtagaggctaacatcccatgatttagaagctaacttctccataaataggaaacccttcctttttttcattttttgttttttgtttttttgagacagtgtttttctgtggctttggaggctgtcctggaactagctcttgtagaccaggctggtttcgaactcacagagatccgcctgcttttgcctcctgagtgctgggattaaaggtgtgggccaccaccactctgctagaaaaacccttcctacatgatcttaaatacctattcagaatgaaggatcattaatagcttcataaatgcttttgttctttaaaaaaagaccatgaccctgtctttctttgtgtgccttatttttaaataagtgttatttgtttaattttttgtgtgggaatgttagcctacatgtagatatgtatatgccatgtgtgtacattgcccacagagacccagaaggcttcatatctccttgaactgaattacagatggttatgagttgccatgtgggtgctgggaaccaagcccaggttctctgcaagagcagccagtgctctttatcaatgagccatctctccagcccacctgtgtgtgttctttactctaataaatgatctctgtatgaatatctatgtatcatggttctgaagacactctttttcttctctttctttttttccttctttcttttttccttctttctcttccttccttccttcctttctttctttctttctttctttctttctttctttctttctttctttctttctttctttcctgaggcaggtttctctgttccaggctgccctggaactcactctgtagaccaggctggccccaaactcaatgagatccacccacctctgcctctcaagtgctagaattaaaggtgtgggccaccaccacctggttaagacactcttaagacagctcttatttatttatgttttcctgagacaatgctttgccatgcacctctagctggcttagcacttgctatacagctgagggtgacctcaagcttgtacctgtctcccttcctcagccttctgagtttgagattacaagtgggcactacaagttttagtctcatttctgttgctgtgataaaatacccaaccaaagcaactccaatggagaaaaggtttattcttcctacaatggatgcagtctgacactgaggggaagtcaaggtgaagggaaccagaggcagccagtcacagccacagtcaagagtggaaggaataaatgcacacctgctcagatcctcctctatacttacccaagacccaaacctagggaatgatgccgcccccaatgggcaggtcctccagctctactaagcaatcaagtaaactccccacagacatgcccacaggcctagacttacccacagtgagattctcttctccctacgttgtgccaagttaacaaaactgtcacggagctcaaccattatgagcactgactgctctccaaaggacctgtgttcaattcacaactacctacatggcagctcccaaccggctgtaactccagttccaggggatctgatgccctcttctggcctctgataacacacacacacacacacacacacacacacacacacacacacacacacacacacacagagtatacagacatacatgcaggcaaactacccatacacataaaaataaaaaattttaaatgtatatggaaagcaagacacacaatgccccaccctctcagctctcccagggagtgaaccaaaggcacctcagataagtacctgttttctgtggtgtgctacgctgacatccaagccactgctattccagcccatgctcctgtgtgagcattaaacgtcctagctgagagattcctgttttgtagccttcctccctttcaagtctatatcccacattagttactttcctagtctctataacaaaatatccagcacaaacaccttaaggagcaaagggttctttgggctcatggtttcagagggttcagttggttcagacggagatggcatagtagaaacagagagactgtgggccaggaggcagagaaggaatactcgccctggccactgcttctccttttcttgctacctcaagtattcaatacttacagcctctattactttcagaaagttataagatctactattaagggccctgtgtgctcagtccatatgtaacatataggaaggactcacaattattctggtcagccccaccaccaccacactaggaaatgtgctgggaagggcggcccctcctacaaagaccagtttgcattggccaaacgcaggccaactggactctaaattttacactattagccgctccaccgattccctggtccttctgtaggattttttttctttctaaatatggaatgctttttgaatttgcttgtcagccttgcatagggccaggctaatctcagtattattctaattttagaatctgtgctatcaaagggtggggatgggggctgttactctttttatggtacccaacatctttaaatgtatctgcttttatctgtatttttatgggagaatttctctttttttagacaggttctcactgtgtagctctgaatgtcctggaactcactctgtagatcagactggcctccaattcatagagatctttctgtcatcactcttggctcagaacaatttttgctattactttaaattacaatatacacccatctgtcatactggggggagggtgtgttttaagataggctctcactatgtagaccaagctggctctgaagtacagcaattcccctcaacttcccaagtgatgagattacaggcatgtgtcacatgtcattgtcatcttgacagccatagagtaagataatgtggtctaaagttatacatttgatggctttctcatttaatgtgtccacagctgaaataccctaataactgagaaaaagaaccaaccacaccaaacaccattttaaagggaagagattgagtgagaatttgagctccagttttcgtcgttgctggtagctctgtgtagagagaaagcatgattagaggtaccgctgacaatgcccgcttggggctggacacaggtgtcactgactatgcccgcttgggcatagtcagagtgatgtgggaaaggtttaagtagctcaggggtgcacactcgggccccttctctcactctctgccacctggctaagcagatctgcgtgagtactatttcttaataaactatctgttatctatctgatctgactccactttgtgttcaccaatagctctggctctcctgggactcactgtagagatctgttgtttctggcagctctggctgtcctgggactcactatagagatcctcctgcctctgcctcccaggtgtaaaaggcctgtgccatatgtccttctctgtgtatccctagctgtcctggaacttgttctatagaccaggctggcctcgaactcacagagatccacctgcctctgcctcccgagtgctgggattaaaggggtgtgccaccagcattttttgagagccagcagaggttagggggagtgagtccttggcatagtggatagagttgatatccaccatgccaactctcggggtttcaaatgacagaaaagtgttagcccaattctttaatagaccactgcaaactgacagggcacaaaggtaacagttccctcctcctttagctacttgccagcctagccatgtgggcaagtgcacctcaaatacttgaaaaattaattattcctgtttttgagtgtgtcagcacacatcgggaatcctagcatttggaaggctgaggcaggatcattgttgtgagtttaaagccagcctggtgtacatatcaagttccaggccaaatgttgccacatagtcatagtgagacctagtctttttttttttttctaattacataagtaaataaatcctttctcctctacttaaaggcttttcaaggacctgaatattgctgtactatatctatgttagtagcaaccctcaacattaagagatttgtacatactattgtcaatagtcattaattattttagtctcttcatttgcatatgcatgctctttctgctgtggaaaaggacagactgggagcgaaccagagatgggttaatttcatgcaaatgcatagtcagttcactcgggctctttttcagctgcagccaccatcgccgcttcccctgacttgataccgaagattgaatttctgtgcttgctgtgtttagagtctatttttaacttggccaactgacttactagggagccatgtgagtgttgctatttttaaataaataataattgtccctgaaaccctctaacagaaaagctctgtcccattccgctgcgcatgttgcagggtacaaactacttgcttgcttgtttgttttttagacagggtctctcatattaccagctgtccttcaacttgctatgtagctaaagatatgcttggtcttctgatcctcatacttccactcgccccccaagttaggaatttactaccacacccagttttgtaagctaatggttatgaaaataataataataacctctaggcaggcatgatggctcagcctttaaccccgggaataaggagacagaggtaagagggactcttgagttctgagcaaacctgagtttcaggccagttaggactacacagtgagtccatctcaaaagtaagtaaatgttacttactgaactatgtgcttgaatacattttctcagttaatcctaaaaataattctgtgttggatagacttcttgccttaccacctgcattggaaccctgcccccccccaaaaaaaatttaaagcacagtaggcatgtatggcagtcagtcctctgttcaaatcctatcattgccactgttgcctaggtgaactcgggcaaacacctctgccctccgagtctcactcaactgtttcggctgttgaaatgagggtgatacttccttataggctgtgatgctcactgggtttatagtaaggccaccgtatggcagatgaggggcggggccggatctcccatgctcatgttctcaggtctagttcacccctaccccagtcaataggggaaactctattgtgctgcccgggtgaggtgcagggcccactttcctgagtgctgcaacccagaactgacctgtgaggaaatctctcctggctccgtctgtctgtgtctggttaacccatgagggatgacaccagcctgctacagtccctgagaaactggctggttgctttctacatctagaatccagagctctgcagggcagcctgaggcattacctggtgactcccaaatttttccctaaatacccacagaggaaacagattcatcgaccttccttatgctcagtcagcccctgacattaccttcttccctgtaagatagtgtaagcggaagataaccatacaccggatatggatattgttggttaactttattgagaggaaatctcttacatgagaaaccaagagcccaggttagctctccgagcatccagtctcagcagctctccgagacccgaccagaaccccgagagaggaccggtacgcacctgtggccacgcccaaacaggcatggtcagcgccacaggtgagtacagatctctccctgcagaatagccacattggatgttggttagggtttcttccatttcaagacagaacttttgactgcttaggcttgtaggtgcagtttttctgttgtgccagtcagttctgtcccaccagccaactcccaaataaccacacagagactaattataaatgttcggccgatagcttgggtttgtaactagctagctttcacatcttaaattaacccatatttcttatctatgctctaccatgtagcagtacctttctttctttctttctttctttttttttttttttttttttttttttttttttttttttttttttttttgttttttttttcgagacagggtttctctgtgtagctttggagcctatcctggcacttgctctggagaccaggctggcctcgaactcacagagatccgcctgcctctgcctcccgagtgctgggattaaaggcgtgcgccaccaccttttttgaacacagcatgttcatctcctgcttcctctgcatctctctggtgaacccccatcccctcccttcttccctgcatcctctcagtttggcttctcctacccaacctcttcctgcccaggcattggctagtcagtcttttattaagccaaccagaaggcaccttagcaaagacacatcttcacagtgtacagaaagattatctcataacataggctggtgaggaaggaggcaaaaagtcttacatgtgctgagaaccccgttatctcagaaacttcacaagggaaagactgtgttggcccaggtaaatcagggagaagtttcttcccctcccactgggtttgtttcccagaaaacactgtatgcagactaaaagctaattgaatgccaggtctggctgtgcatgcttgtaaccccagaactagggctgtgcatgcctgtaaccccagaactagggctgtgcatgcctgtaaccccagaactagggcaaagagtcaagcggatcctgggagcttattggctacaatgcctactctcagctgagcttccatttcagtaaaaaatcatgtcttaagctggacagtggtggcacacacctttcatcccagcaactaggaggcagaagcaggcaaatctccgtgaggccacctggaggccaccctggtctagagtgagatccaggacaggctccaaagctacagagaaaccctgtctcgaaacacacacacacacacacacacacacacacacacacacacacacacacacacacaaacacagagagagagggagagacagagacagagagagcacatcttaaataagtcatcaagggatagaggaagacattggaatcctcttctggcctccacatgcatttgctggggtgcacagacctgctctaccacctctacacacaaaccatcaaaaaaattttatatgacaattaaataagtaattttcctttggttatccaaacacacttaaaaatgtatacatcaacttccatcgggtgccgatgtaatccatgcctttactacacgatatacttaatatctgcagaaaatctgtggttcagatttctggcccaggtactcttagatgctaatgaactttctcaagcaactgccatatttgttgagtgtttattcactcctcaaagcaaagatttgggctttcagtttttacttctggtacaggagatggaaccagggcctcttacacgatgggcaaatgctctaccactgagttaacccagtgtaggcgtccatcctctagcattttgtaaattacctcacaaggtctctgtcacagtgaatacttcagagcagttgctggggcgacacaaattgcagtgatgttgcctaacctgtcaaaactggagcccttccccaagttaagtatttgcatgaaattttacaagctggaaaacttttgattcgcagcacacactaagtgaaactttcagagatggttggtatcttttctctttcatatgatcctagcaagaagatcagaagttcaaggtcattctttgcaactttgaggtcaaactaggctacaggaaatcccgcctgagaacaaaattaacaaattaaaaaaactgatgacctgactctgatccgggaacccacataaaggtggaagaggaggaaaatacattccacaaagctgtgttctaacctctgtagacagacttttctatcccgccagccggctccccaaataaccacatggagacataatattaattataaatgcttataaattataaatttctttttttcccctgagacagggtttctgtgtgtagccttgactgtcctggcactcactctgtagaccaggctggccttgaacccacagagatctgactgcctctgccccacctccccactcccagggctgggattaacagtgtgcgacgccaccacccaagaacctaaaataatcttgactgcctgtgtatcaagtaacttttctgtttttgtgataaagttccatgaccaaaagtgacttatggaagaaagaacgttcattctttttgtttgttttgttttgttgttttgggttcaagattccagagaagaatgcattatggcaagaaggcacctaagcaggcagcagaagtaggaagctaagagagcacatccccgaccataactacgaagtggaaagagcaaatggaaagtggggcagaccatgaactctaaaagctcaccctcggtgacacatttattccagcaaaccatcccaccatctggggggcaagggttccgacagagctgatggagggcgattcccattcaggccgccacgccttgtatttgcagaccttcctctccttgtgcccattcacatcttctgattggtccaaccaataatctagctcagcctgaacaactgaggtttgtctaaggtttgggctacaccactttcagattcctgtctgttaggactcgccatgcatttagggtaagtttcgaggtgagacccaatgtcccgatatggtgccaaaatgtccacatgctgaatgtcccctagaggccaggcctcaaactcaggctatggagcttagcagcaggcatctctacccactgagccatttcacacctcactttcagttgaaaggtggtaaattaactcactacgtcctgtggaagttttaaagccacctctgtttgtcaccacagtactgggaaatggttctgctcattttctctgaggcatttcaatgtcatcactacttcctgactttggtattttgttcatttcataatattttcctttctggaactggctgtggtggtgcacacctttaatcccagaactctggaggaagaggcaggtggatctctgtgagttcaaagccagccagagctataaaataagaccatgtctctaaaacaaacaaacaaagccaaaagttaaattaaacttaaagatgaaataaaaagaagtaaagaaaaacaggatatctttccttgtatattttgttaagtcttcattttataattttctttgtttttttttggttttttttttttttttttttttggtttttcgagacagggtttctctgtgtagctttggagcctatcctggcactcgctctggagaccaggctggcctcgaactcacagagatcctcctgcctctgcctcccgagtgctgggattaaaggcgtgcgccaccaacgcccggtgccattttataattttcctacagtccacgaattgttttatattcccttgcctggtttttgtttttaagatttattttattttattcttaattctctctctctctctctctctctctctctctctctctctctctctctctctgtgtgtgtgtgtgtgtgtgtgtgtgtgtgtgtgtgtgtatgtacaagtgtggtaccctcagaggctggaagaatctgagtcagatctcctggaactgtagttctaggcagttgtgagccaccagatgtgggagctgggaactgaactcaggtcctgggccacctttttaggactcctcaccctgacatatcatttgttagttgcatatacagaatctatctttattatgtttgttttctaaggtttaaaaatatttttacccattgaaatttatgctgtaatagcaaatgggattcataaaggcatcggatcaaacacatttctttgccttggaaaagggtggtccaggcagtggtggcgcaggccgctagtccccgctcgcaggaggtgaacgtgactgtgaatctgtgactctgattaacacaatgattcccagcaccaaaatgaaagcaaagcaaaacaaaacgtgtcagaatcaaccagccgcacacagtctcctctttgattttattttttgtaatgtatttactttaggaagtggaggccaatggctacccacacttgccacagagttcatcttcagagaatgggttctcactttccaccacgtgggacccgggaaggaactctggcttggcagcaagcacctttacccgctgagccatcccgctggcccctcagacatttttaaacctggtatagagacaacagtccagcttcctgtccagtgacacttctgtcctgccgcaactcttcctctcttgaaacgagtgaagaggaaatcctgaatgctctcccacagcgtggcttttccaaactgtcccctcaaccccacaccccctcttccgtgcctcagataatggctgccatttgtggcaggcagagcgattcagagagaaaggcttccttgtaaacagtcactttgagaggctttctgtccatggttggaacctgtagccaggctcctgggtcctggtttgccacttaatttgctgtggaaacatgggcaattaatttaacctctcccacaggatccttatctttaagatgagggtagtgccagggttatttttgagatttacggcttttagattattggcagatacacacagcaggtgctatttcacacgaagtttatttctgtcagctctccctttgcgggacactcctactgttgagcaacaaacagcctggagggtctgaagttaggatttagatcttgactctaaagttttgaggtaatgccttcaaccctaagacattgttactccacctgccaaaatgctattcatattcttcagaaggactcaagtcaatgtcccctccttgctgggctggacgtgcaggccggtcatccctgctacgaggtagggagatgcaaattcaaaaccagcctgggctacagagtgagttcagtctgggtgatttagtgagacgaaattgctaaattaaaagtaaaggctggaggtatagctcagttgtagagccttgcttagtgtgtactggcttcaatccttaataccatctttccttatccttatatgactttagttgactttcagtgtatttaattgattataagaggcgtcattagacatggggagatgactcagtcagtgaagcacttgctgagcacacaggaggtccccagcactcacaggaaaactaggctcccattggaaaaattgagactcactggtcactcacgtcctccttgcctaatcagtgagttacaggtccagtgagagaccccagaaaataaagtgaagaacaacttagaagactctctatctatctctctatctctctctctatctctagctctctctctatctctatctctatctctctatctctctctatctccatctctatctctctctctatctctctatctctatctctatctccatctctctatctctctatctctctctctctctctctctctctctctctctctctctctctctctatctctatctctatctccatctccatctccatctccatctccatctctcaacagaagaccagggttcatctcctagaatgcacatcgtgagagaggagtgaggtttacaacctgtaactgggctctgggggacctgatgccctcttctggcctccactggtacccacacacaaatggcatatactcaagcagacatttatacacataagcaaattaaaaataaatattttaaaacctcaaataatgtagaaaagttgcttctagaatctaccctgttgatctgtttgtttatttgtttttcaagacagggtttctctatttttttattctttttattagttcaaattaggaacaagcttgtttcacatgtcaatcccttctccctctcccttctctccccctcacccccaacctaccccctaccccatccaccctccactccccaggcagtgtagggcccttgatgggggctccccaaagtccaccatcatcctgggccgggcctaggcccttccccatgtgtccaggccgagagtgcatcccttcacgtgggatgggctctcaaagtcccttcttgcaccagggaaaaatactaatccactaccaggggccccctagagtgtggaggcctcctaattgatatccaagttcaggggtttggatcagtcctgtactggcctcccagacagcagtctggggtccatgtgctcccccttgttcaggccaactgtttgtgtgggtttcaccagcctggtaccaaccccttcgatcttcattcctccctctctgcaactaagttccagagttcagttcagtgtatatctgtgaatgtctgcctctgcttccatcagccactggatgagggctctaggatggcataaaaactagtcatcagtctcattatagaggaagggcatttaggttatcctctccaccattgcctggattgtcagttcgtgtcatccttgtaggtctctggaaatctccctagtgccatatctctcctcagaactataatggctccttctgatatggtatctctcatcccgcatcagaagagggcatcaggtcccccagagcccagttacaggttgtaaacctcactcctctattcttcccccaactcaatatttatgctcctccatttcctcctctcctcccctcttctcctgctctcattctggcagctccctcctccctaccctcatgctcccaattagctcaggagatcctgccacttcccattcctggggtccatgcatttttcccttagagtccttcttgtttcctagtttctttggtgaagaggattgtaggctcttcacaaaggtaatccctttgctctatatctaaaattcatatatgagtgagtacataccatgtttgtctttctgtgactaggttacctcacttaggatggtttcttctagttccatccatttgcctgtgaatttcaagattccattgcttttttcttctgagtagtactccattgtgtaaatgtaccacattttctctatccattcttcagttgaggggtatctaggttgcttccaggttttggctattacaaataatgctgctatgaacatggttgaacatatgtccttgttgtatggacgtgcattatttgtatatatgcccaagagaggaattgctggatcttgaggtagactgacagtcctggctgtcctggactcactctgtagaccaggctgactttgaactcacagcgatccgcctgcttctgcctcccaatatccttacatccttttttttttttttcagtcttagaagaaggtagaagtactacagagagctggtgagatgggtgagcaggcaaagcctgatgactcgagtttgatcctcaggccctgcatgataggcagagagaatcaattcccttaagctctcctctgaactgtatgagcacacacacacaccataaatataagtaaataaatgtaaattttaaacattttatgtatgaagaatataccatagagtgctatagagttctgttattgaggggttttatttttttttctgtttataaaatacagggtcctggctgggcattagtggcacacgactttagtcccagcacttgtgaggcagaggcaagtggatctctgtgagttcaaggccaacctggtctacatagagctagttccaggacagcctctaaagccacagagaaaccgtgtcttgaaaaacaaaacagggtcccactgtcgtccagactggacctgaactcttaaatatttttaaaagagagagagagagagagagagagagagagagagagagagagagagagaatgtgtgtgtgtgtgtgtgtgtgtgttttacatgagcacacaagcatgcacaagagaatgtgtgcctccctcaggaggtcagaggtcagttctctatttctccatgtggtctcctgtacctaatataagtctctgtgtgttacttgggactttaatgtggtggtggtcagaacttgggcggcctggctgaaagacatgcctttacaaaatggagtcaggatgtggttttatgagcttccacatatcaaactccggttattaagctttttgacaagtacctttatctgctgatccacttcaccagtgcatgagcccaaactctttaaatcaagggatcctcttgcctcagcctcctgactagctaagagacaggtgcttgtcagtgtaccacactaagattgccatctgtctcccgttttaaagttccctttcattgaacctggtggttcatgcctgtaattctatcaattccagaagctgaggcagttagactgcaaattcatggtcagtctgaaaagtttgaatcctcattgtataaaacttaaatttaaaaatgatcatagcttagggctgatggaatggagggctcatcgggtaaaggcacttgctttgaaagcctaacaacccaagttcgatctccagaacccaaagaggaaaaatcaactaccaaaagtggtcctctgacctctacacccttgccaaggcatgtgtgagtgcacacacacacacacacacacacacacacacacacacacacacacactaacatataacaaaaacgattttaaattaacataacttaggtaaaccacttcttgactttctcagctaccaaatgtgtcaagtaaaattcttcagggtgacccgtaaagtttccccacaatctctctccacccttcccattaaatttgttgctgttcctcctgacactgccctaggggtaaaccaagggctttgatgcgtatgccaggcttgacagatgctgtgtgacattcacactctcttccattttttttcttttctttctttttttagatttttgctatggagttctgcctggtatggtacttgatatgtatgaactccagaatggtctcaaactcacaccaatcttgtcttgtatgctgagatcacaagtgtaagatattatgcctagcctttccatataatctttgatttgtctctatctgtgatcttggtcccagccaagaactgtttcaggtatgtagagatggcatagtggttaagggcactggctgctctttcagagaactggggtttgatttccagcacctacatggctactcacaaccatctgtaactttagtcccaggggagtccagtgccctcttctgtcctccttgggtactgcagacatgtggtgcacagacatacacaatgcaacactcatacaataaagaaaatgttaagaactattcactttgctgggcgttggtggcgcacacctttaatcccagcactcgggaggcagaggcaggcggatctctgtgagtttgaggccagcctggtctacagtgtgagttgcaggacagcctccaaaacaatacagagaaaccctgtctcgaaaacaaacaaacaaaaaacaataacaaaaacaaacaaaaaaatgaactattcacttcatcttccataaaaaaagcttgctaggggatggcaccgacaggctcttcgtgaaggttgtcctctgaggacatgttaagaagcacaagtgataagagcagtcacagggtttctttgtagctttggagcctgtcctggaactcactgtagaccaagctctaactcacactgtctcaacacccgccccccaaaaaaagcagtcattggtaaactgaaggcttgataagccaggcagaaagtgttatagacagcagatggtccattattgtgaaatgtgtacaagaggcaaaaccatagagacagaaagtagactggtagttgctaggggcttgaaggagggactaatgagaattgacagctcatggatatcaaatttgtctggggatggctaaagtattctggaatcagggtcagcaagatggctgagcaggtgaagaaggctaacactgcacttgacaacctgagtttgagcccaggacatccacatgacagtttacagccatctgtaactccagtcacagtgaatccaatgccatcttctggcctctttgggcacgtggcacaaatgaggtgcacagacatacattcaggcacagattccagagaatggggctctgggagtgcaggcaggcaagaggagagagaagattctaccgcagggatgaacattttatcccagggcaaagaccctagccacagtgatggagttcacattgcagagtgatactatctacaggcaaatgcaaagctgggggctcgggggttcatcagagcctttatggggtgctagtccagtgttctttctgattgatgtttaacaatgaggcaggctgagcctgagtttaactctgtcggctcctgacaactccttggagattttccagtagatgcttttaagttaacagaaggaggacaaaacactctccatcatcatatcacagagcaacagactctgtttctttcaggtgctcgatacaagctcaacagggccaggtcggggtttcaggacctgcttagcaaacacaaaaccctgggtttcatccccagcaattaaacacaattagatacacacacacacacatacacacacacacacacacacacacacacacacacacacacagagagagagagagagagagagagagagagagagagagagagagagagagagagagagtaagggaaaaactgtacggactctacaaccgactctattggtttgaggaataactctgctgtttatcagatgagccctcagttctcccatttgtaaagtgggtgttctaatgagagccccaattccacgggctattgaaagaatgcagtgtgctgactggatgcaaagcccccagcacaggctgtgatgagcctgacaatataaaatcagattgtgccgttcgcttagtcacggggctcttcctctaactctcctgcagcagctggcaggtggctaacacacttctgaattaggcaagatgatatttatggacttggtgtagttctgccagtcagttcctctctggcttccttctaaggcattctgcactttaaaataaatgctatacttttgcaattttcaagcaatataaaatcagagaaatgatcctagtgcctcccttccccggggctcatcactctgtttcaacaattgtcagtttgaagccgacgggactccatcatggggacctgctttgtgcccccaccctaactaggttattttgaaaagaactcagatttaatttcatctatattatttcagcttttatctttaatttattaaaaaaaaaacatgtaggcctggtaggatggaacatgccagtaatcgcaacatgagtgagctgacagcaggaagatcaggagttcaaggcattcctctgctatataatgagttcaaggccaccctaggatacattctgttctttgaaacacaaaccaaaaccacttgtatgcatatgtatcgttggaggtccaaggcagtgtgataggcccctactactgagctgcaaaccctaacctcataaggtattttctttatttttcagatgtttttattttatatgtggagtgtttgaactgactgtatgtatgtgcaccacatttgtgtctagtgccctcagagatcagaagagggtactggatctcctacaactggagttacagattcttctgagctgccatgtgggtgctggaatcaaacctggatcctctggaagaacagccagtgctctaaagctgagccatctctccagccccaggaatatattttttaaatattatcacatcatagtaacatctataggataggattgtggttttatttaatatcaacaagctagcagttgtcaaatgtccttgatttttctcatgttagttttttattatatttatttattgtacatgtgtgtggacatgcatgtgggggtcagaagacaacttttaggagttggttttctccttttaccatgggatccgggaatggaactcaaattgtcaggtttgtgcaataattgtgtctatacactgagtcatcttgttggcccatgcagtgtgtctgtgtgtatgtgtgtgtgtctgtgtagtgtttgtgtggtgtgtgtgtggtatgtgtgtgtgtgtatgtgtgtatgtggtgtgtgtgtatgtgtgtggtgtgtgtggtgcgtgtgtgtctgtgtagtgtttgtgtggtgtgtatgtggtatgtgtgtgtatatgtgtgtatgtggtatgtgtggtgtgtgtggtgtgtgtgtttgtgtgtatgtgttttaatcaagacccagtgggttggggcccaactcagagacacagccagcactggcctaacttgtgatgtcctagcaccacacaaataaataaacaacacgggggtggggatgggggggcggaccttggtccttcctcaacaagatgatgggacagacttagtagacttcctaggggaggccttaccctatccgaggagcagatgggaagtggggggggggagtgaggggagcaggaggagaggagggaggaggaactgggattggaatgtaaaaaataaattaacaaataatcttaaaattaaaataaataaacagatccattaattaataaaaagtaaaagcaagatcattcatgtgatgtctctctggtgtcttgtactctgtaaattcatgtcttttcttctttgaactttattgtgttgtatgtttttctgtcaaatctaccacatcttatattttgttgagccctggaatactgtattgcccagacttctgaggctgtatccaaaggccacagcagttatggctgaagggagaacaccctgaacttcaaataaatgaataaaacaactgcagcgtattgagacacagcaagtgtggtgattctttctcataagccttcagaaataaataccttggtcacctctggagaatgctgggtatacaactctccattccaaaaataaagaacggagcgtctatccagagtgtcctggatgcccggtaactcaggataaccaaataaccaatcaggaaagatcctactcattaaagacaaggaactgataaaactagttttgccattcagcttctgacgaaataaaatccttgatatgattgtcaatggctgctacatccacaggcgagaagctgacggccaagctcatagccagctccacaggtggacggcacccgaacccatgggaggaaagataacacagcgcttgcttcctttgctgcttcaggaagtctgcagcctatgaagtagctggaacatcaaatcagaatcccgagccgtgagatggctcagccagtaaagatgcctgccaccaagtgagaggatccgagttcaattcctgagaccagggcgatggaaggcgtggacagacgtctgcgtgttgtcctctgacttccacacctgcgtccaaaacccataagaatacgaaataaaactttaaatctaaactcggaatctaagtttccatgtataagtaccagcttcaaaatagtttgtacttctccctaagatgattaaataaaaggccattaaagccgggcgttggttgtggcgcacgcctttaatcccaacactcgggaggcagaggcaggcggatctctgtgagttcgagaccagcctggtctacaaaaggtagttccaggacagcctccaaagccacagagaaaccctgtctcgaaaaaccaaaaataaataaatagccactaaaaaccagcgggcatttgtcaaaccaggcacttcttaatggtggggatagcacgcaatcccattaattaaaacgaagccttcacccccactgtgctaaatcgcggaggaggggtgaggagctctctgtgtggaagcagcagcgactgcagagtgggttgtggactttgggacatgcctgggttatctccccctccggacctttccatcctgtccttccaggtacaggacactgagccccgggtataacatgcttaggcaagctctccatcattgagacacacacacacacacacacacacacacacacacacacacacacacacacacacacacaccaccctgtattaattgttcttttgcctcgctcacagttcctgacatttttcttttccttcgttcatccatctaccttgctgctggggatccctgagctagctataccctcagccccggatgggtgtagctctttttctatcctcatctggaaggtgaacctgtcttctgcacatgacctgcctttccaaggcggcaagcatctgtcccggaagcaggcgtcacgagtcccttccgtgaggcaagcagggtggaggtggctgtgccaggcccccgcacgcacgtgacgcggtgtggacgcgcgcccagagcagcagctcgctgggcccgcacacagttgtcaagtgggctggtgcctggccccgcctgccgccctgggctctcagttcccaggaagtgcaaggcgcgcacccgccggcttcacgattccctggggcccatgcatatttatagtcctatgcctgaacgcctaggcctcctaggcttgctcctgtcttccctctaggatccagttccgtgtccccataaaaggccacgcagatacacacagcactttaacagacaattgcatgcactcctaaatgcctgatttggagattgcacacccaatccacagtacctaacatactgaatattttggagtcactcagtattgatgctctacttaagaacattaatacacatgagcacacacacacacacacacacacacacacacacacacacacacacacacacacacgggggaggcgggggcagtgtgtattccacagcaccggtatggaggtcagagaaaaacgttttaagttcgttctctcctactatgtaggtcccaggaattgaactcaggtcatcaggctttggccacaagcaagctttgccctattagccacgtccaaagccccgagaaaatttcaaagttcggtggattctttcattttcttgttttgttttccaatgcatgaagagtataaccaaatggtgctttaaaaataattttggaagcagggcttggtggcgcacacctttaatcccagcactcaggaggcagaggcaggcggatctctatgagttcgaggccagcctggtctccagagagagtgccaggataggctccaaagctacacagagaaaccctgtctcaaaaaatcaataataataataataataataataataataataataataattttggagggaaaaaagttatttaatcccaaagaatagaattcacaatgctttctgctctttggatttctgacacagcctgacaaattgttagaaaaagatgcatctagcagatattctggcctctgccattcttatggaaaaatagaaatcactgttccctctgagtggtgaaatgaccacaaagttctgaagtcccctggattagctcttttctgttttccttttagggaggtagggtgggagacaccaggaacagtctcaggtttctcagctttatgagacaaacccaaaggggcacttggttgtacgggatgaaaggtgacagacagatcagtctcccagtttaccttcagctgggaggagaataatcattcgagacctgacatctaataccgaccagtggtcactgatactgcaagcaaaagcttccccaacaaagcacaaatggcattgtctaattttaagtcccaagtaaagggcagagttgggaagaatgggtaaataagcgatccctatgttgaatcaataaatcttttgaacgtaggggtgctcaagagtggggagggaggcaacagactccgggaccagcaaagcaaagagaaccatgtgtatccagtaagcatgagctcaccagggcacgggacattcaaatacaagagtctagccatgaacaatcgtccttacactactttccccaagcctgtggaatctaacctcctgggaaaggtttctatgttgcaatctctatgcaaagaacacactggatgaggtgaaaagacaattccttgttatgttgcattggcaattatttctctctctctctccaactgtcttaccctacagctctctttcagaagataacctgtgcttgctgctctgttagcggtgcttataaccaagatattgttaattacttcaaaatggccattatcttgttttttaaaatttgttttgacacaggagggtggctgcacatgcctttaatgccaacactcaggagacagaggcaggtggatctctgtgagttccaggccatcctggtctacagagcaagttccagaacagccaaggctacacagagaaactctgtctccaaacaaacaagcaaacaaagaaagcttgttttgacaacttcagtggcatattactcagactctgcttcaaaccaaaacaatgattcctgaaatttcaagttttattttacaagtaactgttcctaagaaatccctccccacccacccccccccaaaaataaattatagggttagaaagatggccagctgtgcaagcctggggactgaattcagatctgcagtactcgtgataaagccaggcatggcagtacttgtctgtaaccatgctggggagcgggctccttggggatgcccagacagacagcctagctatcagtgtactccagctctagctagagtcccgtctcaaaaatcagttggagctgcatgtacttttgttcacttttaatcccaacactcaggaggcagtggcagaggcagatctctgagttcaagaacagcctggtctacacagtgagttctaagccagccagaactacacatgagaacctgttcaaagaaagaaaggtggaaaagccagaggaagacacataacctctacatgcacacacagagacgagcacacacacacacaccccacacacacacactcctacatgtaaaacatcttaaatgaagtcatcaaaaacattacctgttaaaaactgtccctatctggacaatgtgctgggtacgatgcccacttcacttatctggtgcacggaggaggctgagagcctgtcaaggtcatggccaccctctcctttggttccaatgtcctgatacactgttacaattacaagaagtgctcagagattatttgctgaacagatgcatagcttatgagtcaacttgattggtttctagtgagaggcgaacagcaagtgagagattacagagcaacactgtgcaaatggcgctatgatcccagatctgtggtggaggtgggaggagaggcctgctaagaaaaagaaaagaaaagttgccctacttcccttaaaaagcagtagtaagacaggcatgggattaagcctgtaaacccagcccttgggaggcggaggcaggagggtcaaagattcaaagtcagcttcagctacctagtgagtttctagtcagcttgaatgcatgagacttggtccacaaaacaaacaaccaagaactaaagcctaagatggaaaagtactgggcttcacttaaagtgtgtctcatccgtattcacaatgagccaggtacctttcctttcatcttttttttttccttttctccatcctagcctgacatccctgtggatctcacagcctcgtgcacagttggtaaactctatcaatgggctgtattccccagtgcagggagttaatttatcattctcaagttcaaaaagcctctgcagtcctgcatgctttcgatccctagcaagatcaaggggcaagaggatcaagtagttcaaggtcatcctcagtgacacctgccctgtctcagaagaaagaaagacagaaaaacagagagaaagagagagacagagagagagaaagagagaaagagagagagagagagagagagagagagagagagagagagaggagagaggaaagaaagaaagaaagaaagaaagaaaggaagaaagaaagaaagaaagaaagagaggctgcactatctcaactacttgggagttgaagcaacaggatggcaagtttcaaggccaggctaggcagtttggatcttgtctcaaaatcaaaaacataaccagggttggagacatagcccagtgatagagtgtttgccatttgcctggcatgtttgaagtcgtgggtttgatccccgaaatcacaaaaaagaagaagaagaagaagaagaagaagaagaagaagaagaagaagaagaagaagaagaagaagaagaagaagaaagaaaaaaaagaaaggacagaaagaaaggggatctagctatgatacttttgctttatttcccttagagtaatttggttttgccaggcatgttgatttgcacctataattccaacgcctgggaaaccggagcaggaggatgaagcaagttggtggtgcatgcctttagtcacagcacccatgtagatcctgcgttcgaggctagcctggtctacagagtgagttccaggacagctagggctacataactctaccatctctaataacaatactgccctatgtactaggacatatccgtgctaggttctttcacgtgcaaaagtgccagcttttaaagctggaaagagtcagaggaaatctggggtttcaacaccctcaatttaccaaggaaagaatggaaacccagagtaccccaacatgatgctcccaaataaacagtgctctagcctgaaacccaagcacttctcttagtcttgggcctcattcaataggcccccttctattggtgacagagtctatattaattactaattaattctatcatctggctttttcatttgtttttccttgcccaaaacttttcaaatataagtattagagattttctagttaataatggcaacaaacagatagaatatacccttattttgtagaaatgttgtattttataaggaaaaccacttccttttcttttccttttttgagacagtcttgttatgaagcccacactattgggcttttaattcatcatgtggtccagctggtcttgaactagggactcttaggccttagactctctatttttgggataacggacaggtcccatcagacctgcttgaggttctgaagtccccccaccctctctgctggatcacttaaggatctgggaatatctgcagtgaattctcttgattaagccaatagagaagacccacgttccttgtgctgggatcccaagagaaagtgagctaaacttggtctcattgtctctgaccacaccaatgtgaccagctgcttcgagctcccagtgcctcggtgtccccaccatgatagactacatcttaaactgtaatccagaataaacccttccctcctgtcttagttagggtttcctattgctgtgaggagacaccatgaccacggcaactcttataaaggaaacatttaattggggggctcacttacagttcagaggtccaggccatcatggcagtatgcagacagacatggtgctgaagaaatactagagtgtactacatcttgcaggcaacaggaagtcagctgatacactggacagtatcctgagtatatgatacctcaaagcccacccccacagtggcacacttcctccaacaaggtcataccttcgccaacaaagccacatctcctaatagtgccactccctatgcgattatgggatgatggggtcaattttttcaaactaccatacatccttaagttgcatttatcacaacatcacaaaaacaacgaagacattatgtttcccaggtgtccttgaatttgcaatccttttgcctcaccctctgagtgcaaaaatttaactccttgaaatatacaaagtgttcttcctctccaaagagtttagcaatgatcaggaacaatgataagtcattatatgataattctgaaaataacattgtattactgaagctaggatgtaactcagtagtgtggtgtttgcctagcatgtgatcatgaggcattgggttcaatccccaccaaagagcatgcaggcattaagacagtatgttactgaaagcactaaatgttcttgaaagattcaaattgtcagtttgagtgtacattaatgataagaataacagaagataatgtttgtcaactgttccccatgtgccagccattgttctcctaatactttatgaacatgacctagataaagtcagcaattctattcctcagtcatatttgacaatatggctactcatattgcaaacacaggaataggaggcaaaagcaacctgcttacaatggtgagcaagcaaatcccaggaacaaccagagtaaagcagttgctaagtgatggagcagtgctgtgccttcctcttggcatgcgtgttactgctggagcagttggtggtaaggctctgcatgctaacagcagcaagtggaaggttgcgaagtatcttcaaactggttgcttgcccacagtgttgcattacatctgaaacatggatctaggggaagaagagaagtctcagcagttaagagcactgcttggtcttccagaggtcctgaattcaattctcagccaccacctggtggctcaaaaccgtggaaaatggaaacttacaccctcttctgtctgatgcccactttcgtcatgcaggcatacatgcaaataaagtactcctatacataataaataaaccttaaaatagaaatatacatctatgcattatgtagtgtcaccttctatattagttggagttctctagtacagagacccaaaagaaagcatatatattaaaagtggaggttattacataggatcacagatacagcctacataatccaacagtatctatcttcacactgaagaatctgagaacccagtagtctagaggttggtgccaactcttccttcttctcctcatcctctctatcttctttccccatccccccatctccagatctttcctttccttctcctcttctctttcatgctctaaggcatgaaatacaggccagcacatgctgggcaggaagctctaccactgagccatacccaaggcatacacagttgactttgaaagtcttcctacctgggcatgctcttggatttcacacagatgttgctacaaggattcttctatccagatgtactggctggttttgtgtgtcaacttgacacaagctagagtcatcagaggaaggagcctcagttaaggaaatgcctccatgagatccaattgtaagaaggcattttctcatttagtgatcaatgagggagggtgcagaccatgatgggtggtaccatccctgggctggtggtcccgggttctataagaaagcaggttgagaaagccattgctgttttaacttgccacagtggcttcgctttaaactactagcagcaagacctctaagacagtagcctagttcaacaaatattctacaacaagccatgcatgggaagaaagccagtaagcagcaccctcttccatggcctctgcatcagctcctgcttaacccctgccctgtttgagttcctgtcctcactccccttggtgatgaatggcaatgcttaagtgtaaaccaaataaactttttcctccccaacttgctttttggtcatggtgtttcatctcagcaacagaaaccctaactaagacgccaaccatcaacctaggcatttctccacgtttcaaaaagatgctctctgtgtgtgtcctatgtcattgcataaacagtcttattcttcacggacagctcctgattcaggcataacgttagagcggtgttgactggctatcgtgatttttgtttggagtcttctgctggctcatgtgtttgaacacttggtcctcagctgtggtgctgtttgggaggtggagcctttgggatacgtggcttactgtgatggttagttttaaatattgacttgccacagcctgaagttagctgaggaggaagtctcaattaaagaatcatctagatcaggttggtctgtgggaggttgtcatgtggaatattcctttacactgtgtaagtatatgttgttgtgtgtgctactaataaagaagctgactggtcaatagctggacagggtaaggttagacaggagagccaaaacgagaatgctgggaggaaggaggagtctggggagtctcaagcagacagaaagagaagaaagatggacatgctgtgctgaggaaaggtaccaagccatatggcaaagcacagataagaaatatgggctaatttaaatgtaagagttagctagtaacaagcctgagctagtggacaaacatttgtaattagcattaagtctccatgtgattacttgggagggcttatgggacagacacttccaactatattgtcatgattgttagttaatgtaagtggtatctgtcctctgtgggtggcaccattccctgctttggggccctagactgtataagaataaagaaggttagccgggcgttggcacatgcctttaatcccagcactcgggaggcagaggcaggcggagttcgaggccagcctggcctccagagtgagtgccaggataggctccaaagctacacagagaaaccctgtctccaaaaaccaaaaaccaaaaaaaaaaaaaaaaaagacaacaacaaacaaacaggagaaggttagcacagtgtaaaaataaaacaagcaaggattcatgtattcattctccctttgttactaactgcccttaaatgatggattgtgactttttggagttgtaacccaaataaacctttccccctatttctaaaccagaacatctaactagcagaggtgggccagtgaagctgggccttgaaggttacacacacctctgatgctggacaggcttctctggttcctgatccaccagggtgtggggagcctgtccctcatgccctgacggccaccaactacgccctgcctatcctgccaaggaagtaaaatcttcctcccttagtggcttctgtcaggtagtttgtcaaccatgacaagaaaacaaagctttctttgaatctggaggctgtgaacatttgtgcgggaggttttgtgtacatttttgactcttctcaagacctcctccgggttgactccctgcagcctacggtaactttagctttagttgctgaagagctgccaagcgatttccacagcacaagggttctgattgccccacattcttgccaatgctccttatttctaccctgtcccctttgcttctggccatccaagtggtatgcagtgggtatatcatggtgcttttggtttgcatttccctagctaatgatgtctttttttgagacaggatctatctatatatatataatcctggctgagccccatcctcagcctaacaatggctatttgttgttttgttttggtgttgtgtagttttttggttttgcaagggttttgtttgtttgcttgcttgcttatttgtttggttttttgttttgttgtttgaaacaggtctcaggttatttaggctggtctcaaactcttttttttttttttaggtgtttttgattgtttgttttgtgtagctttgtgtcctggaactcactctatagactaggttggccttaaacttggagatccacctgcccctacctcccaagtgctgaaattaaaggtgtgcaacaccaccacccggctggcctcaaactttccatctccctgcctccacctcctaagagccagaaaagctatggtgtgtgccaccatagctaacaatgaattttccacatacaaacactaaaattctagtcaatcaaatgcttgtccaaagtaaataactacacacaagcagtttcgagactctctgaagtttgggtgtccctttcagaccaaagctttttgcccttaccagacatttggtagttctgagctacttctaattgtcactagagatggtttccacagacagtgagtgggagctagaatgcttacaggcagccgcctggcatgctcatgggcccaagttccatctctagcaccattttaaaaaattcacatctgctgggtgtggtggcacacacctttaatcccagcacttgggaggcagaggtaggaggatctctgagtttgaaatcagccaggattacatagtgagtcctggtctcaaaaaacataaataaatacatacataatagataaatcacctgcaatgtttataaccaaatctttataactgaagccaaatctttcaagacaaaattctggagtctgtcatgactgaaggccagagtcaagatcgaggtccaggtagacctgctctagggagcatgaatccttaggccattatctggcaaattcttcaggttcctttctttcttcctttctttctctctttctttcttcctttctttcttcctttctttctttctctctctctttctttctttctttctttcttcctttcactctttcttttttttttccatttcttctttcttgaaaagttccctgggacttttcagaggctcaagttcattgccaacaaggttaactagagttaacatccccaaactgctatgactattggtatagatagcttcttctttccttcattccttcctttctccccactctccttccttctctccttccttctttttgaccgggtttggtggagcctaaggtagccttaaactcagaggctgactttgaactcctgatctttctgcttctacctcccagatgctgaagttatgggcatgcactaccatgccaggatgattgattggtgctttttcttaagaacattccaagaagcccaggcatgaggacacacctttattcccaacactcaggaagcagaagcagacaatctctttgactttaaggccagcctggtctacatagcaaattccaggccagccaaggctgaagggactaatttggacacactcttggagagggctcaggagagtcattcaaggtcattgaagacatggtcttcacagctcaggtttcacctctgtccctggcttccttaaccacaggactccctgtttgcttgtttatagtgttgcagtttctgccttcagtgctgtggtctccaggcttgcctgttcacctggaattctgagtgctgcacttactgtggagtgtcccttgacaattccatcactggtgcctgagagagtttccgtctgcccttccagtgttattagcccaccagtcacttccatgtgaagaaggtgactggatgtgtgcatagccacttccaaagctctgagcaagccttgctatccatgcagagagaagatttggctttcattttcttcccattgtagagcaaacacaagacctttttaatggtgttgggtacattttctaagcaagcttcactagtctgtctcctgacattcccgcccttgccttacagtcaagggagttcctatgtttttgtgagtgggtgggcctgtgctattctgggtctctctttcccggctgccaacagagcaggtgttgttcatggaacactagtgctgccaggatccacgctgcctctcctttgtatttagcacttgtgtctgggctgtctggtgctgcctgggctggtgtcttatttcttgagccttcttttcttgccgaatgaaaagacgaagactcttgggactggcaagatgtcgaggaaggtaaaggttcttgtcaccaagcctgctgacgttgggtgtgagccttagaacccacggtggtggaaggaaaactgacctctgtgtgcaccccatatacatacaggccaaataaatttttttttggacttgtccccaaatgtcacggatgcaggactccagctggctttattgatgctcatgtcctacctaccaaagggtttccagcagtcacagcacaaaggctcctgcagagtcaccatccaacaggtctcttctgtgttgaccttgtccttacccgggcccttgacttccactattacatgcccctgtggtctgggctccagtctccatctgatggtctcaacaggatcaaagcacggccaccagtctgaaggttccctcgggtttggcaggaatcacatgaacaaaggtattgtagagcacagcacccttgggcaggctggtgaccaggtccacagcctccgagtttgggggactggacacgtccctctttcgtgtagcggactgtcccctcctccagggcataggggcacttgttcttctgagtcccacatgggcctgggtgccatcgaaactgactatgtgccgaggatcttaccagcacgaacatagtgaccttccattttcttgatgccatagtgtttgcctcgtgatttcccaccaaggttcttggagctaccacctgtcttcttggatgcatatctgacagcaaaagctgtagctgccttgggtctcaacagaactgctgccctgtcctcagcgaaagtactgccgacgccatgtttgctttgcatctgcccaaataatttttttaagagagaagatgatgaatctgtcagaaagacgcgaagttttcatcttggacttcacagaggagaaagactccccagtctttgtcttcttcatactcagagtcaggcagagggacacaagcctctgatcccagactctcgggaggctgaggaaggagactagcttgagcctagggctttgaaaccaatctggacaccacattgagaccatcataaaagaaaaaagaaaggaaaggaaaggagaagagaacaagagtaaagtcacaacagaaaactctacacaggtatcttaggaatcaagcaagtatgtggcatttgtctgatccttcagtcagcagagctctttatcgtcatacattgtttggtactgacaataagctcataacgtaagtaggaaggcgcccagataggggcctgtgagatgggccagtagataaagatacttgccaccaagcttgatgacctgagcttaatccccagtgtattagtcagggttcattagtataatcacgcgtgcgtgtgcgtgtgtgtgtgtgcgcgcacacacacacacacacacacacacacacacacacacacacacacagggtttattagaatggcttacaggctgtgcatcaacttgtccaacaatggctgtctatgaacagaaggtccaagaatccaatagttgctcagtccatgaaactggatgtgtcagctggtcttcagtgcacaccagaatcctgaagaagatggctgtaatgccagggaagccagggaaggaatggacatggacttcctagtgagggcaagaccaagcatgcaaaaggcaaaagcttcaattataggcatatacctataattccagcatctaggaagaggatgttcaaggtctctgaccttctgttcaaggtctcatcctcataggctggcagagattagaggtgggtcttcccacttcaaatgatttgactaagcaatgaagccatttttgggttttagttaattctagatatcgtcaagtcaacaaccaaaacggtcattacacccagggtccacatggtaggaggacagaatgatcctctgcaagttgtcctctgacctccacacatgtgccatgacacacacacatatatgtgtacatatactcatacacaatacattctttaaatcttttttattaaagatgaccaagtgggctggaagtgtagctcagtaatagagtgcttgcttagtatacatgcaacgtaggttccatctccagtaccaatggagggggttctctagaacaagtatttctgtgacttgggaagtaaaggcatgagaacaggagctcaaggccagtttctgccacttagcgagtttgaggcatgagtcctttaatccccgtacttgaaggtagaagcaggcagatcgctgtaagttggagtccagcctggtctacacagtgagatccaggatagccagggctacatagtgaaaccctgtctcaaaaaagaagaggaggaagaaaaaggaagaggatgaaagacagacaaatgactaaggttgtagctcagttgggagagtgtttgtctagcattcacaaaaaccaggtttccatccctaggcctgtatacactggccagggtggcatatacctataattccagcatctaggaagaggatgttcaaggtctctgaccttctgttcaaggtctcatcctcagatatttagagagtttgaggccatcttcagctactacatgggacattgtgtcaaacaaacaagacatggcagaatcaaagtcaaacatgtgtttctttcagtgacctcctaaagttctgcccaggtgacaaaaatagaaatggatctaaaggtgcaggttccaagaaagaaaaaaagagcacaccggtgaagaatagtgcattttaaaaggacttgattttgagagtaggggcaggggtaagtctaaggagttagagggaataatgggaagggtgactatatcaaaatgcattgtatgcagtgtgaaattcccaaagaattaataaaaattctacagaaaaaaaaacaaccttcaaaaagaataaaacaataagaatgagaccatgtggtttgtgactgtggaattagatgaggggtgaggcttacaggaaagtgggctggtggcactaggccagaagaggctaacagtgtgttccttggaaacgctcagagatgggagggaccaacttcaacttctgctgagtgtggcgggaaatgaggagctggtttgaagcatgcattagaatttccactgtttacctttttctcttgttcacatagccagaagaaaatgcctattccagctcttgccccaagaatccagaagttgatttctggagcaagtgattgaataggtcaagactcagacatatgtgctggagaggtaacttactatgcaagcaggaaaacctggcttccgatcccaaggactcatgtaaaaagctgagagagatggcacatgcttgttctcccagtgacaggggggcagagacaggagaatccctggcactccctggctagtcattctagctgacttgttgagctttgggctcagggagggaccttctttcaaaaaaaaaaaaaaaaaaagagtctggagagatgtctcagcagttaaaaacattggctgttcttctagagaccctgggttcaaatctcagagcccacccagtggctcaaagccatatttcagtctagttccaaggggtttggccggatatcctcttctggcctcctcaggcaccagacatgcatgtggtacccagatatacatgcaggcaaaacagccatacacataaaataatgtgttttttttttaagtggaagcctggtggtggtggcacatgcctttaatcccagcacttgggaggcagaggcagacagatctctgtgagttgagaccagcctggtctacagagtgagttccaggacagccttcaaagccacagagaaaccctgcctcaagccaccaccccaaaataaataaataaataaataaataaataaataaatagccgggcggtggtggcgtatgcctttaatcccagcactcgggaggcagaggcaggtggatctctgtgagttcgaggacagcctggtctccagagagaatgccaggacagcctccaaagccacagaaaaccctgtctcgaaaaaaaaacaaataaataaataaataaagtgaaaagtaagacacccagtgtcctacacacacacacacacacacacaatgatgatggtgatggtgatgatgataggaagacttagggatggctgacattctggaaggctgataataagctcccaaagtgctgacactaattattaaactgtcctatctgtcctccaatagaagaatgagccttccttgaaggaattgttccattaaaattctgaatagctggctggggcaccgtggccctgtcatcctaactcgaagctgacattatgaagccttactatgtctccttcagcagttctgtgagtcaccactgttcagtgtgaatggccatgtaaggaggcctcccactcgaaaggcagaaactaaacaagtgaggagaaaagagtaggcgacaaagacattgcatgaaatggacaacgtttcagcaatagatggaattggacagtctccttaaaaaggtcaactaacagcaaaaaattttcatgacaaaatttcccataacagagaaaaatgggtaacagaaaatgttttaaaaatggagacttcactctggccatctcatagacaaccagtagaatttaagaagcaaaataccaggaggggatgtctcaaagaaataacagggggaaagtccctgggatatgaggccagagtttcagattcaaggggcctgtgtgggaaaatgcataaacacatttgtctaagctgtatcccaaaaatttcagaacagtagaggtaaagagaaacaatcaaaggttctttgaagggagcccaaggtcccatgtgcatagccatcctttggtagcaatgggagctggttctgggacctccaagtataccaaaagccataaagtcaaatccctcagatcaaatggagtggtataaaacccaagcccttcccgtatactttatgcctagatttcttgtaatacatgctttatcaacaattgttatactgttcttcttagggaacaatgacccaaaaaaagtcttgtatgagttcagagcacatgccattttaaaaaaagaatccaagctgtgctaggttgaacctgccaatgaacccaagggaacaggggaccaagtgtacaagttctggaaccagctgaatagtggaattctcaagaacattagaggggccagagagatagctcagtggttagaacagcatttaaggctgttgccagaggactccagttccctgcacccacaccaggtggctcacaacacaggcaagtccaactccaggctactaaccacccaattctggcctctccagcttctctgtctctgtctctgtctctgtctctgtctctgtctgtgtctctctctctttctctctctctctctctctctctctctctctctctctctctctcacacacacacacacacacacacacacacacacacacagagagagagagagagagagagagagagagagagaaacttaaaagaacgttagaatagcataaaacttttgatagtttcataaagtaatcttcttttttttttttttttttgtttttcgagacagggtttcactgtgtagctttggagcctatcctggcactcgctctagagaccaggctggcctcgaactcacagagattcacctgcctctgcctcccgagtgctgggattaaaggcgtgaatgtcaccactacccagctctagtttgcttttaatcaagacaattttattcccttgtaccttcctctagagtcactaacgatcatgttcttaccagatgagagatgaaccccagaaagagtggagtgtgccagagtcaggagagaggatgggtcatatattaataggggtggcacacgcctttaatctacagagagagtgccaggacaggctccaaagcaatacagagaaaccctgtctcaaaacacaaaaacaaacaaacaaaaaaccccaaaacccaaggagtagtagaggggagcatggtggggggaggggggcgagccacatgccagggcttcactaggcagccccggttcagaaaggaacagggccaggatactcctgcagggagcagaagaaccaggtattaccctgttagtgtttgtttgcccatgtagaaaatctcctgcggagagcctccaattcagctggagagtatagaaataaatagcaacaatgacacaggaaattgagtgaatgagaaagaaattcagaagaacaagaagtagaatgtgcggctggtggagctgagggcagcctagcacgtatgaagtcctggtgagctgagggcagcctagcacgtatgaagtcctggtgagctgagggcagcctagcacgtatgaagtcctggtgagctgagggcagcctagcacgtatgaagtcctgacgagctgagggcagcctagcacgtatgaagtcctggggccttcgcagcactgcgttaattgggcggtgctgctgcgcctctgtaatctcaacacttggacaatataaggaggaggatcagaaattcaaggtcatctttggcaacacagtaagttttggccagtcagcactctaaatgaggacaggagctatggaactgggaaaacatggatctttccggagatgctcggaagtagaaacagaagaactaggtgacttaatcggaggtaaggggacagggaagtgttaacaggaagtcaaggtttctagtatacggatgtattcatttaaaaaaaaagattttatttattgtgtatacaacattctgtttccatgtatatctgcacaccagaagagggtaccagatctcataacggatggttgtgagccaccatgtggttgctgggaactgaactcagaacctctggaagagcagtcagtggtcttaacctctgagccatctctccagtcctgggatgcattcattctttattattaggaaaatttggctttctaatgctgctgtaacaaattaccacaatgcagtattttggcacaaatctgttaactgacagctccaggggtcagaaatctggtatcagtttcctgggttatatccaagctatggagtattgtgcatggagtttttgttgttattgggagggaggtttgttttggttttagctctgtgtagctctggccgtcctggaactcactctgtagatctgcctgtctctacgtgtaccaccactgcccagttttacaggatcttgtttgtgatttctgcagtgtgggagattatcaacacactagatagctaggcaatgctctaccgatgagctacattttcagccccaggactgcatctttctgcaatgatccagggactctatgggataaatctgctcttgttgagaatctgggttcaattctcagcacacgtgttagcttacaccaatctataactctggttgtaggaaattgtcaccctcttctggcctcctcaagcacagcacgcatgtggacagacatacacgcaaccaaaacaacccatacacataaaataaaaataaattcgtaagaaacaagtgactacccatcatgcttttagtcatggaagtgacagttaaaaggtgttaacccccctccctcaaagaaggcaatagccacaaatgaaatcatatgaattgttcattttcctttctgaccaaagggttagcctctagctcagtggaacatacagctagcatgtgtgaggccccaggttcaattcccagcagtgccagaagaagaaaaaggggaaagaaagccttgacgttgggttgcctaaataaataatctttctgccaaccttttcccaaagccatcaacttaaaatattttataaagagctgggtactggtggtgcatgcccttaatcctagcacttgacaggcagaagcaagtggatctctgtgagtttgaggccagcctggtttacagagtgagttctaggacagactgcgaaactacagagaaaccctgtcttgaaaaagtaatggctttgtggggaaagtcaatacagtggacttacacaagaaccatgagaaactgatgaagaaatgaacaccaaaaggagagtgtacatcgtatgatgttaagacatgagtcaactgtatttgccaattagtgttatgacccttcctagctgtgtacatggctttgcaagcatttacttagtataaaaactctatgtgagacgggcgttggtggtgcacgcctttaatcccagcactcgggaggcagatctctgtgagttccgggccagtctggtctccagagcaagtgtcaggataggctccaaagctacacagagaaaccctgtcttgaaaaacaaaacaaagcaacaacaacaacaacaaaaaacctctatgtgaataccttattcccattttgtggatgaggaaactgaggtatagaggggtagggaaacattttgtgaggggacattatttgggagggtcttattatataatctaggctggtcttaactcacagcaatccttctgcctcaacctctggagagctgggattacaagtgtgcatgaccatacccagtgttatgtttgtttgattgttaagttgggaaacttgcctcaatttataaatccagtaagtaagtgctcttaacaacttactcttaacaggtttgagacctctgtacagaatcaaagcctctggcacatggaagccaaaggacaccagtttcttatccagagatttttccccctctgtttcttttctccttgcttaccattggaaaccagggttctggggctggagagatggctcagcagttaagagtgtgtaccgctctcagcacacacacaagggatctgacacacccttctggtctccctgggcacctgcactcatgtgcacataccccagcagccatacggacacacagacagacaaagcaaatgttctaccaatgatcaaaaccacagctggattctctgaataagagcagggtgtggtgggtgacattggcctataatctctgtacttgagaaataaagacaggagggtcagggatttaaagttaccctttgctatggagggagttggaggcctgcctaggctccaagagacgttgtctcaaaaacaaaattattttttgttgttttttttttttttaaatcactatctgccaggctcacacctttaatcccagcacttgggaggcagaggcaggtggatctctgtgagttcgaggctggtgtggtctacagagtaagttccaggacagccacggctgcacagaaaaaccctgtcttgcaaaaacaaaataataaaaaaataaatcactatttaactgatttctttctcaatgcctctttattatcgtggtgatggagaccactgttaatctggaccttaaatgtctttcagctttcatatttgaaattcaggttgggctggacatggtggcacacacctttaatgccagcattcaggaggcagaggcaggcagatctctgtgttcaaggccagtctggtctacagagtgagttccaggacagccagggctacacagagaaaccctgcttcaaaaattaggtagatagatagatagatagatagatagatagatagatagatagatagatagcaaacaatcagttccaggaatcctctctctctctctctctctctcttttgaaactgtgcctcttacagagttcagggtgccctttgaactctttgtgtactggggctgatcttgggtgccctttgaactctttgtgtactggggctgaccttgaacccttgatgtttttgcctctatctctcggagcatcacaggttcatgtcaccatgcccagccatatttctttaaggaaatagtataatcagatgctgaagacatgacaatgggggaaaaaaatgagcaatgagtcccattttacagcccatcaaatctctcccagcaaaggaagaaattacagccggtctccaatagacttaagtctatggttaaaacgtaactggcctccatctctcaacttgttacttcttgtcctccctggaggcaagaagataaattccctctgctcctcccaggcaggcgggaatgaagattctgtttacaaagtacttaattagctggtgatattactcatcttaatttgagagaattagcttcaaactggtctacccttactatgtaatacagccaagttcggagttcagttcctgatagggaagaataaatcaactcttccaaggtgaaactgaattctatctcctaatacctgccacacacagtgcctttctgtcggtcacttctccatcgaggcaggggtggacaaccattgccaattcatcgcctttaccaggaagaaactgtctcatttgatggacagctagggatgttatctccatactttaaagctttacactaatgctaggagagatgtctcagtggttaagagactgctgttctagaggacccagcacccaccttggacagttcacaactgcctgtaactccagctccaggggaatctgagacctctgttttccataggaatctgaatttacgtgcacacagatgcacaactgaaagtattatcagtcttttttttaaaaaatacctatttatttactattttttgttttgtttttttgagacagggtttctctgtagctttggagcctgtcctggcacttgttctgtaggccaggctggcctcaaactcacaaagatctgcctgcctctgcccctggagtgctgggattaaaggcatgtgccaccactgcctggctcttatttacttatttttgaaacagcatctctctacatagtcctgcctatcctgaaactcattaaatagatcaggctggcctgttacagagaccctcctgtctctgcctcccaagtgttggagtggaaggtgtgggccaccacacctgaccccctcccttatatttaaagataaaagtgtattacatgtcttggtgtatatgtttccatgtatggtgaagtgcatgagccattcatttgtgtggaagccagaaaacaatttcagtagtttcttctttccttccatctagtatgtcctggggattgaacttgaggtgtttggcatcgtggcaagcaccttgacccactgagacatcttgctagcctcacttttaatttgttgttagctacaatagttacaatgcttctgaacaagtaacatgcataaggaacctggctatttgttttctttagaaaacacaaacagtgcttggatcctatgtaaaagataagtaccccaggagtcaagaacttctagctgggctcattggcacacccctttgatccggacactcagaaggcagagacaggcagaactcaccatactatctccagaacatatagatgaatggagcttggtgttgccttttaatcaaaagaagtgtcatttatttatttattttgggttttcgagacacggtttctctgtattgctttggaggttgtcttgctctggagaccaggctggcctagaactcacagagatccgcctgcctctgcctcccaagtgctgggattaaaggcatgcaccaccaacgctgcagaagtgtcattattaaacagcaaatattgatgtcttcctcctagaggcatcaaaatgaagttgcaaatccttttaataactgctatgctaccactcaatctcgggatagctaaataaaacgtttccatctcctttcactcccaaagtctaggattggtaaatagatgatgattagattcttttcagtaccattttatgatttaggattttcctgtttgtgacttttaacactggagtagttaggaacaagtggttgtcatttgataggtcaaagggcaaagggaattaatggggagcgggagggggaggtaaagggaggaagcatagaggagtcgggcctggtgtacaatgtacttgtgtagtaatgtcttacgtaacaactaacatgcacaattttttttacaattattccttttttgttgctgtcgttgaaggggaatggggcatggcatgtgagtaccacagctggtgtgtggaattggaggacactcttcttaggttgggttttccatccaccacgtaggtttcagggatggaactcaggtcagagggcttgtggtggcaagtgtccttattcaccgaacttgcatctcacaggccctcatttaaaagatagaattagctgtgcagtagtggcaaatgactttaatcttagcactcaggaggcagtggcaggtggaactctgagttcgaggtcagcctggtctatagagtgagttccaggacagctaagccagagctatatagagaagaaaccctgtctcaaaacaaaacaaaacaacaaacaaaacaaagaattaaaagacaaatgagtaaagacttagatgctggaaacggatttgcctgaggttacctggcagtgcggtggaggtgctggctgaaaccacctgtgatccttataaactcattcattccccacatctggggtcctgaacccttccttctagcagttacccactatgagaaggccagtcagagagaagggcagatatagatacaaataattacaaaaacgatggagcaagaatattaggagatgatggattctcggagaaggcctacaggatgcaatggggtggagtggacatgggggcagggagaatctttctgcaggacgggactgcatcaaacgtaagagcactgagagatctagcttcagaactgctcagaagttgagatagcgagatactattcatatctatactagctaagaatttaatagacaattcagctggtgtttctattgctatggtaaatctattgccctgaccgaaagcaacttggggaggaaaggtttctctgtgtaacagttctggctgtcctggaactcactttgtagaccaggctggccttgaactcacagagatccacctacctgcctctgcctccgagtgctgggactaaaggcttgtgctaccactgcccggcccagtcagaagattgatccagatgtttgtgcttcttgagagtaggtggtcttgtcagagttcacccctgaggttttcaaaaacccctgaaatcttaagtaatttggggggaggggattgagacaggatttctctgtgtagccctagctgtcctggaactagctctgtagaccaggctgggatcaaagtcatgtgccaccaccacccattacaatttttttcttcataacgctttaccctgtattaagattaaattgatgggctgggtggccaagggctgggactacaggtgctttccatcatgcccagtttattgggttcttgggattaaatttaagtctttaggcatttgagccaaagcgctgtaccaattgagctgcatccccacccataaattgaactgctttctttctttctttctttctttctttctttctttctttctttttctttctttctttctttctttcttcctttcttcctttcttcctacctttttttttctttttgagacatggtttctccgtgtctttgaaggctgtcctggaactagctattgtagaccaggctggtctgaactcacagagattgcttgcctctgcttcctgagtgctggaattaaaggcatgtgtcaccactgcctgactttctttcttttttaaatttatttattcttatttttatatacattggtgttttggctgcatgtatgtctgagtgagggtatcacatcttggagttatagatagttgttagctgccatgtggatgctgggaattgaaactgggtcttgtggaagagcagctggtgctcttaacctctgaaccatctctccagcacccccaccccagttgaactttttgatataggaaatagaacttgggcagaagagttaggtgatcttagcttcgtcacttaatagccttataaccttgggtcagtattttaaacacccttgattctgtttccatttgtgaggactgaggttagtattcctaccttgagagactgctatgcaaatcagagctatgttatataagatgcctggcacagtggctggtacacagcgggtactgaattataccaggtaataatcacaaattaatcagctaggacaaagcccttcaaagtcatttatatagaacttggttggtgtgatccgatggagtgcaggagcagggaggagtcacacaggcgcagagtgtacacagtgtcttggcaattaggccagagttcaattttacccctaaaccccaggcagcctttctgtgtgactgaactcagcatgctcgcccactgagcaacaccactagtccctctccctcaacttctgatgaagtgcttacttaatgaccagctagcagaaagccacatataatgaatgtatggcatggtcttggctaattactgcttacaaccagcttcgtgaggtgtgtgtcaggtttgattaggatttggttttgagtgtggagacattcgtgtgggacaggcgtgtgtacaaacctacaccatgggaaccatgcagctggtcaagatgcctggcttctgtggggttgtcctcaggtctcatggcatcttagtttcagcatgcctctctccaaactacaagctggcactgtgttcctcacatctgttttgactgcataccatacagtattggatacagcaaatgttcagtaaatatttgttacattgataaattggaaattgcggagacatacgctgctcttcagatacatatgtatttgtctatgtatctgactcacttttctccccattcttcgggccagttttccaagtagcctgtcaattgagtcacatctaattgctgctcagccttttagctaatatcaagtgttgagtcacaggtagtctgtatatagctgaatccttggtctaactgctgtcccaaagcagtctatgatggaaatattctcttctgtattatgcagtgcaaggccacagggtatggaggacaatgaaaagggcttagagtgactgcagaaagaattttggattttgttttaattaatttagagttgaatagccacatgtgactaacggctattatattggccaactctagcatatagtctcttgtggaggaatggtgacagatctcttataggccacactagcttaatctcactatgtgtctgaggctgccttgaacttttgctcctcctgcttctacccctcaagggctgaaattatagatggttctatagtctctcatgttggctatctcttgtcttgtgtttttctataccacaatcatctggtagatgacagacaaccctttctgatggtgtttatagtttgaaggcttctctggtagtcttaaatcaccctttgaaacaataatcctttttgaaaaatttatttttattgatgtgcatgtatgtgagtgcctgtagaggccagaagagggtttcagatgctctggagttataagcagctgtgagctgcccaatgtgggcactgggaattgaacctgggtcctttcggaagaacagtaattgcttttaaccaatgagctgcctccaccgagctatcccttcagcacccaccttctaagttctttatttagcctcaggagccagagacaggtgaatacgagtttgaggccaacctgggctacatagctagttctggaccagccacagtgagatcctgtctaaaaaagcaagcaaacaagcaaacatgtatatgaaaacacacacttatatatgaatgaagttcatatataaggatacagttcaggggaaaggcacaaggccctaggtttgctctctcacttcatacatatcaatttaaacatgtgtatatagggccgggtaatggcagcacacacctttaatcccagcactcgggaggcagaggcaggtggatctctgtgagttcgaggccagcctggtctacaacagctagttccaggacagcctccaaagccacagagaaaccctgtcttgaaaaaccagaaaagcaaaaaacatgtgtatatatgttactcatgtgtaaacatatacacacaaataaaacagtcactaattaagtcaccatttagagttttcaactggtaaaataaaatgtggagtggcaactatgtttaaaagaagaccaagggagctgggcggcgttgatggcgcacgcctttaatcccagcactcgggaggcagaggcaggaggatctctgtgagtagaccagcctggtctccagagcaagtgccaggatagactccaaaagctacacaaagaaacgctgtctcgaaaagccaaaaaaaaaaaaaaaaaaaaaaaaaaaaaaaaagaaagaaagaaagaaagagtggatccttttcctgcacatgtaaaattgtatttcacattcattactgacaccaacactgttctaagaatagttgttataaataaatctggtcttattagccatataaactttcttagtttggtggggttttgtagctatgtagccctggatggcttcaaacttactgagatctgttggcctctgcctcctgagtactgggattaaatgtgtccaagaccacatccagctgcaatttaatgtttcactgagttagatggagattgtttacatgtcactgacatttaaaaattaagtatctgcctggtggtgatggcccacgcctttgatcccagtactcaaggaggcagaggcagacagatttcttagagtaaatatctgagagtacatagaaccacattaataaaattgtatgcttcctaattaaggaactaataatctagtttatgaacttgtaccccctatagttatcttccatttttgaaccagagttttattttattttattttattttttggttttttgagacagggtttctctgtggctttggaggctgacctggaactaactcttgtagaccaggctggtttcaactcacagagatccacctgactccgtctccagagtgttgggactaaaggtgtgtgccaccaccacctggcttgaaccagagttttaaattctagcttgtggtttatttataagcttaagagacattaatttttgccgggcagtggtggcacacgcctttaatcccagcactctggaagcagaggcaggcggagctctgtgagttcgagaccagcatggtctacaagagctagttccaggacaggctccaaagccacagtgaaaccctgtctggaaaaaaacaaaacaaaaagacattaaatttgagggctgctccaccacctccactaactgagaattaccagactgtactagttcattgatttccacagatactaattcctattggctcatgactcaggagtaagataaaatgctttttaaaatgatttcatcagggtgtggtggtgaatacctttaatcccaggaggaaaaggctggaggatcttagcctgatctatatattgagctctaggacagccggggctaattagagactctgtctcaagaagaaaaaaaaaaaaaaaaaaacaaaaacaaaactaatcaaccaaaggaatcattttattaacaggttaagttatattagccaaataggataaacttcatttctatgctttcaagtttcagatgcacagaaagaagacagggccaaccatagctttactgccagagtacttggttttgtagaaacagggtctcaggtagcccagattagctttaaattctttatgtagccaaagatgacacacacacacacacaacctttttggttttttgagacaaggcatctttatttagccttggctgtcctggaaatagctctgtacaccaggatatttggagctgggagatctgcctgcctctgcctccctggtgctaggattaaaggtgtgtgccaccactgcctggctgactgaattcttgatcttcttgcctgcatctcccaagggttgtaattatagacctgtataaacacacctattaggcacaatctacacagaatggcccgtgcagaaaataaattctatttctacctaaaagtttcaagaacataacatgtttttaattacagagaaaaatagcaacaattttttgtttgtttgtttgagatggggtctgtctgactatacagcccaaggcggcctggactttactatgtagccctggctggctttcaactcttgatacttctgcctcagtctgccaagagataggactgcaagtgtgtagacaactcagtgtgtgtctgaaaaaacggggagaatcaaagtgcattaaaatttagctggatgtccctctcatggttaactaagggaagtccttcctgcaagaggcctgtctttacagtgagtctaggggaatcttccatgcaattctaggggttactcaagggtcactagtaaagacggtgagaagtgcacaaggcccacactgcatgccgtgcggcacggagcggtagggcaagcctgcgcctccccaggccttgcaccaccgggtatggaagagacaaaagaaacgctggggcctcgcccttgcggaacttaaaaagtccgatcggcaaggcagggcttgtaaaaaattaaactgcaatgaagtggaggaagaaaaaaacaaaacacaaaacaaaaaaccacctctgtctaacagccgcttatttgtgctctgcggagcagcagcggaaacttggcggagtcttaaagcgagagccggagggacagacaaaaaaaaagacaaactaagatggaagaaaggagggtgtcctccagcgggaaatgccagatgaggacgcagggcgggtgcaggggagcctcctccgggcccacggaggcggacggcccgtggagcgcggccgccgagaagccggaaaggccggcggccgccgcggccagtcggtttaaccgaaaggcggcttcctgagcctccatttgcgcgccggggcccagcgccgaggtcgccccgtgggggcggggcggggaaggggcggggcctgcgcgcgcagccgccctagcgagccccgccccggcagggggcggggcgcctatattacgtgcgcggcgccgccccggcgagaggacgttgcgtgctcgctcgcgccaggcgagtctccgcgtcttgcctcgcgaactcggtgaaaggaattggcgccgttcgacaccaggcgggtccgctctgcagcactcagccatctccagccgcagccgccgcccgggccgaccagcagccgccgccacaggccgagggagccagcagtccgcggtgaaccggggccctcaccatgagttcttcgcctgttaatgtcaagaagctgaaggtgtcggagctgaaggaggagctcaagaagcggcgcctctccgacaagggcctcaaggccgatctcatggatcgactccaggccgcgctggacaacgaggccggcggccgccccgccatggagcccgggaacggcagcctcgacctgggcggcgatgcggccgggcgctcggggacgggcctcgagcaggaggccgcgaccggcgccgaagacgacgaggaggaggaaggcatcgccgccctggacggcgaccagatggagctgggcgaggagaacggggcggcgggggcggctgacgcgggcgcgatggaggaggaggaggcggcgtcggaagacgagaacggcgacgaccagggcttccaggagggggaggacgagctcggcgacgaggaggagggcgcgggcgacgagaacggccacggggagcagcagtcccaaccgccggcggcggccccgcagaccccgcagcagcgcggggccggcaaggaggccgcgggcaagagcagcggccccacctcgctcttcgcggtgacggtggcgccgcccggggcgaggcagggccagccgcaggccggaggtaggaaggcggaaggcggcgggtgagggctgcgtggtgggcgggcgggcgcgcggcttgtaggcccgcgtggggaccgtgccccaggccggccggggccccaggggcgagcgacgcgggcgggcggggggggcgggggagccccggggccgccgagaggatgggctcgccatgccggcggcgcctcctccattatgtgtgtcgggcgccggggggagctgcagctgccgcggtgggggaggagccgggcgggagcggcggccgctggagcgctgcgtgcgcgcggttcgggcacatgtctggggggagggggaaggtcccggggcgggcgggctttggcggctcagcgccgcggtattgtgcaaggagcgcaggggctcggtgtgacgtcacttccggcgggaggcgccgggcgcggggagtgaggcggaagctcagtacaatgcggcggcggggcacgcgggctcggatgggggaggggaggcgggcccacgctgccctgccctcccccccacaccccccgccgccgccgcgcgcacggcgcgcagcacgtgggcccggacggcgggcgcgcggttttagtccttaaatgcattccggaaggttaccctaggctggcaggattagcagcgtctttagactgcgtcaccgtctccagtgcagttccaggctgatggatacgattttttctagattcatattagtttcgtgggttaaaaagtctcagaactcgcctggcgttggtgccatacgcctttttccccagcactcgggaggcagaggcaggcggatctctgtgagttcgagaccagcctggtctacaagagctagttccaggacagcctccaaagccacacagaaaaaccctgtctggaaaaaccaaaaataaaaaagtccgagatccagtctaggagggaaaaaataacagcccctaaaagtcccggaacagaaacgggagcttttctctataattcagtctgtggcctgatgatttaaggctgtgttctgtgtcgttataggagacggtaaaacagaacagaaaggaggagataaaaagagaggtgttaaaagaccgcgagaagatcatggccgaggatattttgagtacattgaagaaaacaagtacagcaggtagaggatcctaacctagttttatttgtcacccagtttttatgcgtggttgggaaagctttatcaggagacgattctgtctttcagagccaagtctcctcagccacctgttgaagaagaagacgaacacttcgatgacacagtggtttgtcttgatacttgtaagtgaagcaaactttcccgctctttttctcaaatatttaagtgcagtgctattttggtttaactcttaggaaaagtgtgtttgtatatcttaaagtggagaaaacccgttagattgttttaaatcaggaagataatagctcatgttcaggttacagtagttttatgtttagcgacacttcagttgtattgctgtttttacaagctctactaattgatacttatgtcatggaagttcccaatatttagggatgtaaaactaataccgatttttgttcagctttcagaaacttgtttttaaaacctgcctgtaacatgtccttagataggtaatatgaaaattaaaatttttctgtggagctactatattaagtgagctatttgggctagttgaatacttactaacgattttcccattagcgcacaagtacattccctattctaaggattgtcatattaccttttcaataactgctcttttgttctcaattccagttcagtagctgctgctctaacataagttgatttcttccaaagacctggggcagcagcagtgggctatctgagccactagctttcttcagcagcgaatggtatcaatggcagcgctgtaaatatgctactttagagtatgaggaagtattgcaagccatgaaatgggctttagctgtcagatttgtattttgatcctttcaagaagtttgttagtttagtatttgatagggatgtataatgcttggtgtgagcagaacaaaaggtgcttgaataaagagttttaaagggtttcacatgttagaaagggttaaaaacttgtattcccttgtttacttatacacattgtgttcagagtcctgagagttaaatgtaacttggctgctttctgtcagttaagtcttgaagaaagagaggagaaaacagctgatttggatttttttttttttctgaagtgtaaaagattttggaattcacaaggtgctttagccgggattgaagagaatggttagcagtgctatttcagaagaatagtttaagatccagtcgccaggattacttgttttaaacacaaattttaattctgtcagcagtcaggaatattatgaacaaagctggagaatttcaaacagcagatgcatttaataaaaaccaagagccttataatttaatattctttgtcaagtgaattctgagaagctgcataatgaggtctagtgacccaaagatagctaggttaaagactggatttgtataatccaggcaggagttaattcctagtggttataccttaccagggtggtaaaacagacacattaacacttcagactgacaggtttgtgggttgatctggcttacaagttttcagaagtgagttaaggttctggaaccctggttttagtctacaaagttacaggatcagcagctctcaaaatatttggtggtggcttcacttctgttattgtcactggtaaattctacctggttctggcatgcttcactttgatttcctgctgtcctctactgcttgcctctaaatcaaggtaaagagcagagcaggtatgtattgatattgcattgtctcagtcatattacatacttaaataacttcaacgattggcagttgatgttttagtacataattaagactgccttggtgggagtggggctccaatgagagtttaggaacaagcgcatgatacaaagacaattctcagcagtaataaatacgattaaaagcatctagattttctctactttgctgaaatacattgggtgtcaaaaataatttggcatttgatataatttcagataactgtgatctgcattttaaaatatcgagagaccgcctcagtgcttcttcccttactatggagagttttgcttttctctgggctggaggaagagcatcttacggtgtatcaaaaggcaaagtctgttttgagatgaaggtaaatggaattttgtggcttctcaggagctttgtttttattggtaccagtcacaggagcctattaagttttcttgggagactttgccattaaaatgttttgataccggaatatagagagctgtctcacttacagagttttcctttaaatatacattaattttgacctttgttaatgctgtgtattatcaacttactagttgttagttggtgattgtgattggttaaagattgaatgcttttctctttgtgttaatagcagaggaagaaattgggtccataacccaataccatagggtttaagggatttagtcttttatagcttaatcatgtaattttgattcttaggtaacagagaagatcccagtaaggcatttgtacacaaaagatattgatatacatgaagttcggattggctggtcactaactacaagtggaatgttgcttggtaaagtttacttatatttgagtcatgtggaagcttagatgtttaaggtctgattacattattgaaacctagaactaaaatgttaataagccttgacctgattttatctgttcagtgttacttttttatagttagaatgtacagacaaggatagtttactttccttgttcttctgtagttctaaagatgattaaaatagactacttttggcatgtaaattgtcaatttaatgtgtatatcctaccagactataagtcactactataagtcacttaagcatttgggataaaggcagatctgtcagaatgtaaggcaatatgctcaataattttttaaaaacattttttaattcattttacatgccaaccactgttatccttgtccaccaccatccattccttagggtgaggcattctaagcctggcatactgagttgaggcaggacaaagtccctccccccaatgatacctttttagtatatgttttaaatagtttagtgtgctttggactgcttagaccctaattttaagttttttttttccttttaggggaagaagaattttcttacgggtattctctgaaaggaataaaaacatgcaactgcgagacagaagattatggggagaagtttgatgaaaatgatgtgattacatgttttgctgtgagttaaacttactgtaaatatcagtagctgtgtgtgtatattatagattaaagaaatactatccgtgtgattaaacttacatactgattctgggttaaagacagggccttaggaaaagaggctcagcaggtaaagttctgctgtgtgagcatcagagtttggataaccttgcaccagtgtaaaatcagcacagtagcgggcatctaacttgggtttgggtgggagtggagaagaaacaaatgaagcctccagctctaggtttaatgacagaggaatacacccaacatggaaccctgctgtgaaacaaggcagttaaaattggggggaaagacatttcaaggatcacaaacattttttttaaagattttattcattatatatacaacatcctgcttccatgtgtatctgcacaccagaagagggcatcagatctcataataacgatggttgtgagccaccatgtggttgcctggaattgaactcaggactaactgtaatgagacttggcaccctcttctggcatgcaggcatacatgctggcagaacactgtacatataataaataaataaatctttttttaaaaaatgaatggcctgggaaacaccctctaaatcctgaatcattacatctcagcatttagcttaaacatgttaactgcagggtgagtctactcctgtttcttgacaagtttagaaagctctcaaaatagtttcaagctggcttaaaatacttttgttgacagaactttgaaactgatgaagttgaactctcctatgcgaagaatggacaagaccttggtgttgccttcaagatcagtaaggaagttcttgctgaccggccactgttcccgcacgtgctctgccataactgtgcagttgaatttaattttggtcaaaaggaaaagccatattttccaatacctgaagactatacttttatccaaaatgtccccttagaggacagagttagaggaccaaagggacctgaagagaagaaggattgtgaagtaagttgttttcaatgtggtatttgtagattgttcataaactgagcaaggctaaatgatgggaaaattataaatacttgctgatgaataatagtctgtcgtgtgtgtgtcccccccgtaggttgtaatgatgattggcttgccaggagctggcaaaactacctgggttactaagcatgcagctgaaaaccctgggaaatacaacattcttggaacaaataccattatggacaaaatgatggtaagtaaaatttaaagtgtcaagaatattaggggatacctctgaggaagaacacttacttgcctagtatacattacatgtaccctgacattaatcttagaattatagtaaatgggttcagaagttatcctaggttaaccttggcttgtgtttctcttattaatatcttagagaaaagaattttggctaaaacaaagtggggtactttagtgattgctttcccataaattaaccttgaacagcaatttaaagagcaaggtcataaaagctattgtagtaatgaaaggatgcagttgaatttgtaaaaatggtgcctggtgtcctgtatgtgcagttcagagcttttaaaatacacaaagtaaaagaaaaattttggtaggtggcaggttttaagaagcaaatggcagatactggaaaactgaacacgctgttgcagagagctccacagtgtcttgggaagtttattgagattgctgcccgcaagaagcggaattttattctggatcaggtgagcaaaagctttgaaatttttttaatattaattgataagatgtgagattaatgtcttttaactcttcacttttccctttaagacaaatgtgtctgctgcggcccaaaggagaaaaatgtgcctgtttgcaggcttccagcgaaaagctgtcgtagtttgcccaaaagatgaagactataagcagaggacacagaagaaagcagaagtagaggggaaagacctaccagagcatgctgtccttaaaatgaaaggcatggagttttcctgttattacttactgtcttaagtctgtttctgtgagttatgcctgaaaagtgttttttaaaactgccagcactgttaggaattatattaatttggcaaatagaaatgtgtttataaaagatgtctctaagctatccatgaacaaatatagttttataattttaatctgactttattccctataggaaattttaccctgccagaggtggctgagtgctttgatgaaataacctatgttgaacttcagaaggaagaagcccaaaagcttttggagcaatacaaggaagaaagcaaaaaggcactcccaccagaaaagaagcaaaatactggctcaaagaagagcaataaaaataagagtggcaagaaccagttcaacagaggtggtggccatagaggacgtggaggattcaatatgcgaggtggcaatttcagaggtggaggcaagttaattttaatattctattcgattgaaattttaaagtgagcagaggatcttttagtttgtcaagtagctaaagaagttaatttcttagatattttatgctgccatgtctaattagtatgtaatttacaattcatactatatattcagtagtgaagtatgacattatttgtttttcactaatgctgtaactggactgaactctaggttatggcaggactaaataaactcttcttgtgtttagctcctggtaatcgtggcggatataataggagaggcaatatgccacagagaggtggcggtggtggaagtggtggaattggctacccatacccccggggccctgtttttcctggccgaggtggttactcgaacagaggaaattacaacagaggtggaatgcccaacagagggaactacaaccaggtaagaggagctagcatctataatttgacctagaaagttgtaggtggcattgacatagttgtgaagcagtttagtttaatgatctttgcttttcagatgcactaacagtaacaacaatgaccaggggtatacagggtttcagcatgcccctttaaaatgtccaagcattacttcagacctatttacagatatttttttttccctttcatagaacttcagaggacgaggaaacaatcgtggctacaaaaatcaatctcagggctacaaccagtggcagcagggtgtaagtagttttcttaagtaattacataaattgtagtttttatgtttacaagaatcagatcggaagttcttatctagggattgaagtgtttgatacaattatagtcttattactgtgttataaattgtaaccatggataggctggagttttaacagatttttagataaagtaatatttactacatacggtgtttttattatggttctttttaatagttttaattacgtaaactaacccaagtcttgtgtttctttttgtaatgtgtattggtaaataatatgggtaattggtaaattaaaactaagtctctggtctgatgtagaaattaagtgtgacaagtataaatttgtttccagcaattactctgaattagatcattgtcatttcctaaaaacaatttgagtggcttattgatgtttttttttctttaaaaacaaaattttctcttacagcaattctggggtcagaagccatggagtcagcattatcaccaaggatattattgaatacccaaataaaacgaactgatacatatttctccaaaaccttcacaagaagtcgactgttttctttagtaggctaactttttaaacattccacaagaggaagtgcctgcgggttccttttttagaagctttgtgggttgatttttttttcttttcttttttgtacatttttaattgcagttttaaagtgaatcgtaagagaacctcagcattgtgcacgataagagaatgtgtcagtatttcagggttctacattttatctgtaaaatgtgacttttttttatcacaacaaaagtaaaatgttgctttgtacctggtgtcttttattaagcatttactcccccatttctcacagagaataacagtcgggagtcattgtcacaataaaatagcaatgttagcaaccagattcatggaaggactaagtggtcctcatgaattgcataagattctgtattgctcataatacactccatcctctctgtaaactggtgggtaatagtggaaaggaaatttctgacaaaccgggaaagctattcttttttctgtttaacaatggaatttgaacaattgggaatgaagataaaatttagaaccaagattgagaagatggagtgtatgtagaagggctgttaaaaatgtaaacttggttgcattatatgtggaggctcaaacttgtgaaggttaaataccataaatttttccatttgttctgcattttgattctgaaaagaaagctggctttgcccatttcttattaaaaaaacttgttgtaaatccagttgtctaatgggatctatatgaagttagctatgtctgtatgcccttctcccacaaaatactgtataactagtgtgcttgtagtagttaactccaccatctttgtaagctaatgaaattgtgagtcacccatttatatcttttaatcatgtcagttcttgaatgggtatctccttagcctgctgatttctttttctttctaaagaaagtgggtggagaaattaatttagacgtttgtttgcaataaaaagaattcattttactcttgtttgggattctcgccatcaaggttcaaaatccctttatactacaactcccaagaggagaaattataagtgtgtgctttctggacagcttattcttttactctgtacttggaacatttaggttttaaaaacttaaatgtatattgacaattgatttatataatataaagctgaattcttcccttcccctccccccccaggtggcttttaacatttatgaggggcaaaggtactggctgggagaagttaatgctcagttgatcatgcttatgaaatgtgaatggctgtcctcacctgattatatacataactattacatgaacctttgggaacagatgcttttagaagccatcatgcaagccagtcattgatttcactactacacaatgctgctaacttaactagctatgtgataacattagatcccctaattgtaattttattgggtttgcacagaacacttaaatctaaaggatcctcactgtgtgaagtgagaatcaggagtcaaagtgtagaactaaaattagaatttagtctagtgtgccagttttttttagcctgcttctggtaagtttaggttttctatattgctgtttctgtaggattttgttgaggtattttaaatcagatgttttttaaatgtgagtttattgtagtatattcatggaaattgttacaaggcagccagttttagattaaataggttgaaatagaaataacactaaaaggtagtgtctttggcatttggcttaaaaataaacttactgttagtaactgctgcatatacattattaggattatatattcctaacctgggggacaattcaaccttataattctgattaatcaatgttgtttatcctgatattttagtttgtgcctttcaaagacctagcagtagagacttaggggggaaaaaaaggagaaaggggatcagctaacaaagtaggacttgataaagtaaaatgccttctggcagtaaacactacacttagcagttacatctatgcttgcaaattctctttagtgatttagtaagagtgattgcatacaaaggggaggaaaatgacttattttaaaaatattgatgaaatcagacctgaaggaaagaattgacttaaaaacatgcccagtgataagcaaaatactggtttgaaataatgtgtcaaccagaaaaacaaaaaacaggattgcttttggttcaagatgtgctttcagtcaagctgggcatggcagcaaaggcctgtaatctacagaggggcagaaaaattaccacaagccttggctacatgttttatagtagggccctttaaaggtcttaccttagtgaaatccattgcctgctgagcaaaagctggggaacagggccacatcgtttggtcaacactagtacttaggaaaatattgtagattaataacaattgtagaagtatacaagatagaacaaattggtatagtctcaagtttctgataggatccaagtagatattgaagaccttggctgtgactaagaaggcttatggttaacttataagccattttctagattctagaagacaaaaccagtatttttaactttgaggttacattttggcttgaatttaagattccctcttaatgacttttctataagcttgttcattaattcaagtctaatagactagactgtataaaaaagactgatagctttttaggtagtgtgcagttgttaaagcctagttgcatgtgcatcagtgtgaatatatttgatttttttttaaaaaaaaaaagagtaagtataaagcccataaattccttcttacataaatgtaatatattttttattaaagtgaacaatttgtagcagattacattccagtattcattcagttatttttcctagaaagataaccaaaaaaacatttgcctaaatcaatttggggataaaattcataaggtggtttgagtctaattttttctatactaaatattctggtgcctgggtattggaagtagtgtttgggaactgctaagttgtaactttaatagtaattaaaccaaaacgttaaagaacccttatgtggttagtgtacctacccattcagagtatagttaggccacggtcacttaaaaggactcaatataagtcacaaagcttggaataactagctttgtggctcaacagttgctttccctggggaaccttttctgagtatgatttgtagcttggcatttgagcagagatgtagatacaacttttgcttcaacttataaataaaaaggtaggaaagcctatccagttgtttttttttttttttgagttttcaggccctggtatttatttttccttgttgtgggtacatacttgtaagagacaagtattcaaggaactttgtttggctaactcatgttggagtgtggcctttgtctcattaatccttgtcactaactttttttttgccaaagcccttggacatttggaagtgatctatacaccctttgagtgtacactagtagtgtagtgtagactagcagttagaaccagggatcttgaagtatctcacaaagtgtatgctagtttatttgaaaacacatgggtcagactcatgtcaaacagcagattgaaagccagaactctgggaatgaattttctttccccattgactaaagggacatgaggttgaatattgagatgctctagaatgtcacataatttgcaaggtgggattcagaagattaagcaatacttagacaatgaagcatcttaattacaagcccaatgccagtagggtaagtgataggccaatattctgttagccatatgctagaatctattctatacttgtagcaaaagaaggaagtctgggtggagaggctcctttaaaacaaagctgagccagcatatggagcttgctatattatattcagcatcattagacagtttaggacctgtgtattctggaaaactagaaaggttccaggcatttctttgaacaactggataccttgtatggtagtgacataatgccatattcaacttctgtagaatttacttgggtttgagtaagttgaattgtttgcctgctttcctttggtccccttggatgagacagaaaatagttcacccactaaaaataatccttcacctggacacctaaaagtttgatactgaccaaaagttgaagccatagaccaaaacttgtgaattcaagtattaaaagcatacgtaggtagataaaatatttttgtcagctaaggcctacaagctagttgaggtgggagaatcatggacaagtaacaagaaccaagggttccagcattttcttgaagcttagtaataaaagcaatgtgttgatttaaatttcatctcctttttcttagtctgtccatgtgactgtgctgtgtgaagagtaaaaggggcccaactaaatgtgttccagtgattctaataggtattcaaattaattgctgcttgtatgttaatcagttatgttaggtttccaggatcacattacacaaagccattggcaactaagtggacaggacacatctctaagctttcctaattttgctttttatatcagaagtaaaatgtttgacaattgacgatttttgcataagtttacaggaatacatttaaaagacttaaaccaagtccttacacattaccctcagaggcctatgcaaaacagtgacctttagggtactttctgcccttgttatctaccgcatttttttctgtgttggacctaataccagcttcagaaaatttgggaaatagactggtctttcgagtaattaagtggtgatacattcttggaagtctaaacttacaagatgctaaagttaatgggaaagaaacttggtatgagctttggttgcgtctcccctggggcatttactacaacaataatgtctgggtgaaaccaatgaggggacttggtttcagttttgataggggtttaagcagtaaaaacagctgtaccctcaaaaggcaacctcatggccttcaataggctgccattgttcatctgaggaaaagaaaagatgcagaaaaactaaactattaaataggctttaaattttattgacaatgcatgttttcatgtggtatagaagcaattcctagggaacatttatagtacatgtagattagttttccagtgctatgtctaagcaagtgtttagagatacagtaaaggtcacattgttgtacacttaaagtggacaatagaaatatctaagcaggtactagccttaaagtttgccaataccctcattagaaactggaaagctgtaatacaacggtggagaaacacttctttgcagccacatttcatgtgtttagccaggacttggggagactgagacagaattatctgtctcttttttttatgactgtaccacactgaaaattattttcttgttgcaaattagacttaagatgtataaaaataccagtatttgggtggtagtagtggatactggctattgatctgacaacttaataggccattaaggtgcttcaaaattatagaggaccgttgaagtcagaattatagaaactgtttaattttcctatttactaaggtctgcgtacccaaagaatagtgcatatttaacatgacttttaaaggggtgctttgacacctgtcagatttttatctaggaatagaaggattcaaaccctatttgatccttagctctttgctgaaaagtgcataaacaggaatcctgaatttattatatagacctccgcattatataatcgaagcaaagggaaaccatcgatggagttagaggtacgtagactaaaaagatgcttgcaaatcaaatactggttttagcatagttgagatttattgtttccaaattcagtcactaagtcacaagtccagaaaaaaagctgttctattaaatctcccgaggtccttttactaagatggaaaagcaaggaatcagagggaggggttgagggagggggcaaaggaatacagcctaggattggtagataaattacgaaaaaaacttcaaaactactaacactataattctattttaatcagctatttagctggtacctactgctatatcacctagtatgaaatttcgggattatcggaacaatgaaggaagcagtatgcacagagggcattgaaggtaggttgagtttaaaattggcaatgtaaaagttagggctgggatggacatggtgtcttggaccttacctagtaaatacatagcaatagaactcaattatgcctgaccttttgggaaacctaggtgtggtgtggtacataggctgaaaggagacttgtaaggaaaacaaagttagtaaaggtttctggcaatcatggacattctggtgtccgtgaggcacagctgtcattgtttgggtgggataacaacagtaggttgaagtaaggtgccatagtgattcatacctgtaatacaaggatgcttgcagtaagattgtaaaagtaaaatacaagattttagaaacattagtgctcattgaagtatgtataatggcttgttccaggcaagtcaaggaaactaaatgctttgtggctctttttatccagttgtgctcctgtgaaactgaactttgtaagtagcagaagatactggaatgttaccaaccaagaggtttctcttcacggtaagatataattgcggtatgataaaactggagctcttagtaaattaaacctgaaagcataagaacactgtccacatcttgttagaatactagattgaccatttaaccattgacataccataaactaatatcagtgtctaagttctgaggtggctaccagctgaaaacttagttcatgtgtataaaccataattgactggtagttacacaagtctgcaccctggccttcatggtgatcaaaagaaaaacagtcttcatattgaaggatagatgttcaggtgaaatttctcctacagtctggcacgtttcattgtattcaatagataaggttcattttttttttcttctggcatgactggtacagtgtacaagcatatactctggcttccaagaccagaaaatgttttcatgcaagtgacaatacaactcacacttcagagctttttttattgtacacagtatacatttgtggttgatacgaaggagtagttctgagtttctatgttcaaggttgctcagctgctgttactgctcgcagtttttctttcaggatcaaggtgggtgctttcatataaaatcttatttttaattccttctctggcaattctttcctggattctttgcttagcaaaattatacctacagtggaaccttgtaagaaaagaatatgaataaatttctagtttctatatgactaccctaagggatttttaattttatacaaattgctaaaatttgtatgacccctgtcaagatacaaaagctttaaaagtttttcatgtcaccttagattatctgttgtggaacatgaacattgttggactctgtaggttgagctcactttattcagatcaagtgcatactttaatggaactctgccattcatctgctcgggcattcaatgactgatagtgggtgtttaccagaattgacattgtcatagggcacattttgatgtaaagaattttcttacccgagactaacggctcatggctttaatcccagcagcactcaggatagtaagggctagccaggaccacaggaaatcatcccaccccaaccccgatttctgaaggcgtcggtggtggtgttgcacacctttaatcctagcagatttaatcctagggtggagtacagatctgagtctaagaccaccctggttccaggagagcctgggcacagtaaacctcgaaataaacataccagcatcctaaagtcaccagcataaatcctcccactccaacgtcacatgatctcctaattctacctgtcaaaaacaagcatggtcagtgtgatcatgtcctatgtagaaagtgtctcaccacagaaataatgctcaggagaaatactcactggtcaccaagaaatgtccaagtccagccacaacagatcctaatgagccatatagtatagattctcgtgcacagggaatgttctcaacatctaaaattcctaggagcttaaaagactaggaaaaaaaatgaaaaaggatgcagattgaacgaggaaaaagtttaaatgtactcttaatttatcattttgggaattggaataattcctgaggctgcacttgcatatttgacctctagtataaggtaactaaatagttttatatctgtcgcacacactggctatgggatgggatggaaagactttcgttttaacatcctgttaatatatgtcttagccaggcagctggtaggtggttcgtgactgtaatacctacaagaaggttgctgtgaattgaaaattggtctgcgctccaagatttaaaattctcataagcgaaattgtaacttgttaatgtagcatgtgtgaaagaagctacgctgtctgtattggatcccaaaaacaggtctggataattgaatgtcggtcttcagtgccatccaatcaatgcagctagaacactgcataagagatggcgcctgcaatgggagtaatgagggtgggaaaaagaaagctaagtcaaggcagctcagaccttttagagcacagatgtgggtagggctggaccttactcgtgtcttactcctttggctcaaggatctgcttgaagataaaatgtgacttggttatcattaaagtaaaattttgctttcccagatggcttctgttggcttagtgttttttgtttgtttgtttgtttttgcttgtatcacacccaacttttgggctacttcataaacaggctgcaagcttcacaggctgtccttccactcagtttgggaattgctctcaccataagctaactgggagactgcacaccctcctttgttgtagcataagaatgatgggatagtgggacagctataaacactcttgcatccaggacatgatgaatgggcacaggctatctatataaatgggatctcaagtcggccaagataaatgcacctaaatgcaccagatacatccagaccacttcaattggattccctcctgtaattgtgaaacactgcaatttacaggttactgttcttagcttggacagctcagataaaatgtaccattaaagtgctcaatgcatttaaaatatgctcaagctgactaagcagttaagagcactggctgttgtaactacaggttgtccctaacacctgcatggcagttgtatcactacaacttgggggggggggcaccttggactccatgcaagcaaaaacatgcagatggaacatttttagaaaggttcaccctttgatggggaacatgtgagtgttgaagggtcgcacacctggccttttctgcctttcatggctggtaggcaagttccccaccagtattcctaagcccctttttgcatttaccagtccaaccccctaaagaagtgctgctatttggatggatgggagtcagaactatctgatgacagtctcaccactagggctctaggaattagctctagttttaggcgtcgtgctgagctatctcactagccccaaccagaaccaaaataccaatttcctgctcccttttaatggcaagactactaacattgcctacatctctacagctagtaactccaattgtcttgcacagcagggttgtcaatgccaagatttagaattcatctcagcaatgggatacatttgtttggaacaatttgcagtaatgtcatcttgttccactggccaggatctgcccttttatctgaatttaatgtttctaccttgcagctcaagacttacagttgaatgttatttatacccctccctgttgtgcttattcagtcattttgtaagctgatgaggtattttcaaaatatctttgtcaaatccacgtgaagttttttcagcaagtctagatgagataggtcaacacttgacctttgttgtaataccagcttatctgatcagtacgttatagctgtttaattcgtaaaaatgtatcaggtgacatctttagacgtttcaccatggcttttcgattttacttagactacagtcgtaagcattgctaccaaggcacgtacatgctcgagtacgagttttgtatcacattttccttttgcctgtagccattctatgaagtctagctgttcactgtctaacagggcagtttccttaggtctgacttctaaatgaaattccacagcctaattaccagagtaggatgtaaagtgcaaaggctgtccgtttgataatagagcccaatccatgcagcactcaaaaggattagcgaatctaccttacctgtgtgtgcgtgcgcgcgtgctcgtgtgttatgcaagcagagactgccgcattagcccaggctggcctagaactcggctgcccctgcctcagccttaatgctgagattactggcacgtgtcacctcgcccagcgctccggatagatttcatgacccctcctactagcccttagctaccaaagtacagcgcagtattcattccgatcccgcgggtctgctctcggccagtttgaatcaactgcgagcactagacggctgcaatcgccggtggtcatggggaccggacaggaaagccccgcgccctgcgcgccctccccgcgggccccacggcgcgctttaccttcttttccggctcgtgcggctcccgcgcggccgccatggctgccactcatcgccccgcccgccccgccccgccccgccccggcgcgacggaagcagcagggctccgcccaccctcccgcgcggcggccatcttagggagcgccccgtggccgcgccgaagcccgccgcggcccgtcctttgttccgcggggcgggtcacagctcctccagccccgtagctggccgtcagggacgggacgacagagaggaggcgaccgagagaggcgccctcggcccccgtcccccaggcgccgtggctcgagacgccgagcgccgagaaagctcgcccccgcggcccctcctccgccttaaccgccatttccaaccgtcgtgcgcgtcgccgtgcgggcgccgggcgcgcgccgaggcggggccggggggggcgcgcgtccgtcggcgccgctttgtcctccgagagggcgggagtccgggcttgacggcccgcgcactgccggaagtcgcctagccctgtttccgtaggcctcgtcccctacgtgtcctttgtcctggctctggtgaccttggctgccgcccgcccgcccgcgtccccggcctcagcccctggcggcggcctctccctccctcccttcctccgtccctcccctgcgcctgccgaggtagacgtttcagatagcggcgccgccgcgggagacaggacaagatggagcggccgccgctagcccggggacgcgcgtcaggccgcgccggctgcgggaggaggaggaggaggaggaggaggccggccgggcggggatgcgacggcggcgactcgggcctcgggttcccgcctcggatccggcccaagcccctttgttcgccgcttgcgtccctcacggtgagggaggccggccgccctggtcctgttgtccctctcaggctcactgcggcctccagggtgcacacgctgctcgtggttctgtgtccgtccgcggtagactctgtgtttttaatttctgttctcatactgacggttaataaagtgtcaaagccccactatcactagggaatagaaaaggacagtctgggatgctctgctgacattcttgaccagccaggctttgaattcctgtctggaaggcaatatgtaaggtagtaatattccataaaggagagaggaattcctttgagttcctaattgcggtataaaggacttaactggaaaagtaccgaggaaataacgtcgccatttatttgtcactgagaagttgctagggtagactgagttggactccatttcacgtggtttaaaaaaatgttttttgttaacaattgatagtgaaaagttaaaacgctcaagtgtcagcccttactgaaagtgtggatgaaaaaaaaaaaaaaaaaaacaatttcacctcaaagggaatagtttattctggagccaagtatgagtgtccatgacccaagaacatggattcaaactacattcaccataacggttttctgacgtttatatggtaacaaaagtgctaagacatttttcagatgcattgataggtatctactataggctttcacttgtatacgatgacgttcgtctttgggattggtggaagctcgtgttctgcctgtacattctggaaggatggtcacaaggatagatgttaggctaaacataggagcggggcatgaatggctattaaggaggctaaggatagcctaagataatttggctccaggctgcaacattccagtctctattatcatagttgaatcaatcggccttgtagaatttttaactcgggagggaggtgaatgtgggtttgtggcttctttcccttgggaactaccggaaaagaatagttgtgtttttccaaattgttttcctttttcttaattattgcatgaatacataaatttttcagtcctttaaaataacattcgatgcaggtgtgttgcctctcacctgtaattccatcactcatgttgagagagtagtgatttctgattgtgattcaagaccagctacagagccagactgtcttcagaaacaaattgataaataactcactggaggctttgagagtatagctcaagccggatggtggtgttgcacacctttagtcccagcactccggaggcagaggcagacggatctctgtgagttcaagaccaggctggtctacaagagctagttgcaggacaggctcccaagccacagagaaaccctgtctcaaaaaaacaaatagaaaaaaagtatagctcagtgggagagtatttgccagcataccggtatcaaggaaggccttgttttgagtttggtacccaggacttttttttttattttgacttttccagacagggtgtctctgtgtagccctggctgttctggaactcactttgtagaacaggctggccctgaactcacagagatccacctgcctctgcctcctaagtgctgggattaaaggtgtcaccactactaccaggcctaaacccaggactgttaatatacacacacaaattttaaaacccaccataacctgccacaatgcatggggtaaaaagtatggcctcctgtagggcacacctgtagccagcccctaagtaggcgtggctacagcttcccctacagcctccagtctgttttacacatcttcatttacatctctgtatgatcatagtgggccggtcctgtcagctgtactctatttctacctttggtcattcttgaattttttttgttttgttttgttttttgtttttcgagacagggtttctctgtgtagctttggagcctatcctggcactcgctctggagaccaggctggcctcgaactcacagagatctgcctgcctcttcctccctagtgctaggattaaaggcatgccctaccaacgcccggcctcattcttgaaattttgcaataaatgcaattgtgccttatgcagaaagcaactgtttacagaagcagagagataacagctaaatcattagctcagggtcaagttgttcaggaatttggggcaggtccagagaccagtttactcaaagatagttttagcacttaaaagtgtttttaggaattttttgatgagatggcataattatagttcagtagcctactacacttctgccatgtgggtagtagggaccaaactcaggtcttcaatggagacaacaagctgcttcgctgtcttgccaatccctacctgctccttcataagaatcaactcggcatagcttttgtgcacttacataaaattggctgcagctcagtggtagaacgtgtggataacaggagtgaatcttaggttccatcttcagggtcacaaactcaatgtcagcaactcagagatctgactgcctttgcctcacagatgctgggattaaaggtgtgctcccccactgccgggcctttttttcttgatcatagaatgcttgaaccttgtgatcgtgctcattatatattttccctgttgatattgaatgcagtagtttatcaaccttattctttgccctgacacactttctgcttggttgagtatggatgttgctttccaccatgtttactgtctgtttagatcaactgcctgcttactgttgttttggatccaggttttcactacatagtttcttggagatcaaggatttaaaggtgtgtgccaccacggatagctgtttccatcctggtattcccagtacctttgctgaagaggctgtcttacctccaatgtaaaaataaggtgactcagcagttaaaagcacttgttctcaggatctgacaccctcctctggcctccactaacacataaataaaaataaaggtcagatgacttttaaataaaataaaaataaaaaatcagaggactgtagctgtgtaggtttatttctggatcttctgtgtatgtctgttctgtgttatatgtctgtgtagcttagataataccaacactcaggaggtggaggcaggagcataactgagattgaggcaagtctggggtacagaatgaggtaggtgtaggccaacctgggctgtacagggagtctgtcttcaaaagaagaaaagataatgaaaataaaaggttttaatgtagatttaagtgcagaagtttgaggggcatggttgttaggtaaagggtagttacacatacccaagagaagtaggtttgagcagagacagggcatggggacataacatttaacaactttaacaacaatagctgtgtgtgattctggtgacttttgaagttatattgtccataccacttaccagatttagcaaaaatattttagtatacctatattcatctcagaattttttctttaataaatgagaccataaagttgtttatgaagtgcattgtacagatttataggctggcaagatcaaaacatgtcaaagaaagtcaaaggaatcctactgtgcccagggtcacaaggaggccaaagcacatactttgctggaaacaaactgatcttgcttgtgagattctcagaaaagcactcacagataaaaggagcatgtggtcatactctacaccttaagcattgatcattatttttttaattattcctattttatgaacattggcattttgcctgcatgtatgtctgtgtgagggtgtcagatcttggagttacagacagctgttagctgccatgtgggtgctgggaattgaaccaaggtcctctgaaaggacagttagtgctcttaaccactgagccatctctccagccctcattattcttattagaaatatctttcagaaaggaatgctgagaaaatgtctatgtagtcatcttcatagcaacgtttgttagctatatagaaattcttggctctctgcaggcacaacttaaaactagtttctgggataaggggctgttttcccttcccataccccttataatgccatagtgggctcagatgtggttccctgagatagcctggtgagccagtgtctgaatagactaagtatagttccttggtagctgttcttaactgttgggcctatagagcactagctgtgagggacaatgaaagcagtgtttctttaagatctgaacacaagccaggcatggaggtttatgtctgcaatcccagcacctaggaacctgcaggaagggcaccatgcatttgagaccagcctggactacatagcaagatcctgtcacaaacagaagtcaggatattaataataggtattttacttgcaaatcattaaaataatgtcctaatccaagacctgtgcaaaattacaataatatagtctgttagagtgaaataaaattattctaaaattagaaacgggcctggagggatagcacagcagttaaaagcactgaccactcttcctgaggtcctgagttcaattctcagcaaccacatgatggctcacaaccacctgtaatgagatctggtgccctcttctggcctgcagggatacatgcagacagaacactgtacataataaataaaattaaattaaaaaaacaaaaaaacccacaaaaacgaactctctgtgtgtgtgtgtgtgtgtgtgtgtgtgtgtgtgtgtgtgtgtgtggtggggggtgacgggggtagagagcaggatgtaactcgggttactggactggattccagaaccaaaataagcagatcaataaagtaaataagtaagcagatcaataaagtaaaattagaaatgtaattctaaaagaaagattagcctccattttccactagctgaaatgaatggtattttagtgtgaattaattctggatacttttatttcagaaaatccatgtaagctctatctagcttcagccatcaaccttgggcctattttattttgtctatctccatctgtctttaatttttttctttctctcatgcatatgtgaaaaacatatgtgtggtttagggtgtctgtgaccaccatggctagcagagtgttgatctgagggaagcaaaaaggcagtttggctcaacaacacttaagtagccagtgttggttcaaacttggggaatctgaccctgagtattttaggtatactaaaacacagcacagtttggtgaaaagtttgctattgacaattaacccaatcctgtgctcacacacaataaagcccatagtaagctaagtaaaaattggatgtgagtacattgggactcctggtaaagagaagcttacagtaagagtttggggaggctagcagtggtggcgcaggcccttcaaatcccagccctccaggggcagaggtggggccagcctggttcacagggtgaattccaggccagttagggctgttacacagggaaaccctgtctcaaaaaaaaaaaaaaaaaagaaagaaagaaaagcaaacaacctcccccccaaaaagccaaacaaacaaacaaacaaacaaaaacccaataaaggtctgggtaaggatccagtgtggtctctgctacccagatagcacagaggtcaccaggccattaaagacaccctctctcagcctctgggcaggtaacaggttatgcatccctttccttgaaggaacaaccctgtgtgttgttcagatttccctagggcgtatctgtgagctgaagacctcagtgcgtccttcttgtccacacggaggcctgaggtttgcatgggggtcttcactgatggctctccacctttctcagcaggtgtagcaattttctctgaatcgagacattccatcctagaacctgccccaagacttgggaaataaccgactcacaagtgtctggaagtcccctaagctaacctgattgacaaggctcctcccttcctgaggtcacgtgagcagaggaggcctccacctgtcaatctgcctgtacatcatgcagaaatccgggttccatgtcatgagttgtccccatgttggggtgggcttccgacgatgcggccacccgttcctgtaacacctccaggaaactcattgtttcaccaaactggacttggtggtgtcatcactttgtctgccatcagttccctatctggggtgaatgggcattgttcacgtctctctgggaatggtgtcacaacacaggttctctcgactgaatctacagcttgctgatagggctggctaatttgtccagccagcttgctctgcggatcccatccctaccttctgagtgctgggatcacaggtggatcagccacatgtccacctttcatttatgtgggtttatgtgttctgggtacacgaatgcccgtccttatggctgtgtaagaaatcatctgcccagttccccatttaatttttactaaaatatttttattttattttatttttctttgttcttgtgactgagacagggtctcgttgatagcttaggctgacttggaactcatatagcccagactgacctcagactcgcagctatctcctgcctcagccttctaaatgatagggttatagatgtgggccaccgtgctcagttcttgctagacagtggaagcattccaaataaataaataaatagcttcaaccgattattccaacaaataaattgccaatactatcagctggaccagtttgcatttgcacttagctgatctctgaatcaaataaatggccagtggcaaatggcaagggggagggtgacaaaaatatcctgaaagagtgaaaccaaaggggccatgatttgagcaaagattgggggtgggggagctgtagcctttgaagacccatggggtcagcctgcccctctcagtacctgtattcctagcagctgttgataacttctgctgaaaccgtgacttggtttgtcccacctccattcctcccagatttcttaactggtatctgtagtggagaactggggttacgacaaaagcagcaacttctaagaagcagtgccctcgagtggggtgaggggagcagggttgtctcagcatgaaggtctgagcatgctgtgcaagagcggttccccggctccttcgttttccttttcttaaaaattgcttgtatttatttatgccctaaccttttacctttccagtctccatttattcaatcctgaggttttgttatgaaggcttatgaagttttgttgtaataacttattaaatcatctgtagctcagttggtagagtgtttgcatagcctgcaagaggccacgccccatctccagcaggacatgatggtgcccgccccaaatcccagcacttgagagtggagacaagggattcagaaatccaaggtcagcctcctcagctgcatagtgagttcgaagccagcctgaactacatggcatgctttctcaaaaaacagataacaatctatttcattttatgcagaggctcaaacccagggctgatcacgtgcactacagctacaaccacagaccctgaagcttaggggaggaaaaaactacagaatttttgttccttttctgtgtttacatattgggtccctctttccagataagatttgccagcatctgcaccgactgaaaggtcagacataattttgctcttttctggttagcaggaggagggatccacaagcgctatgagcacttacagtgtgagcacacacgcaatgggcaacaaattgcgcaccccagtggctaatatttttattacacattgattgggaaagaaatgcaaagccagttagaaaaactccactgagtagtgtgttaccaaaagattttacagttaaatatttttacattgtgtgtgtgtacgagagagagacagacagagagagagcgagtgagagagagagagagagagagagagagagagagagagagagagagagcacacgagggtgctaaggtggaggtcagaacaatttgagttttctccttcctcctggtggatcccaaggatagaactcaggttgtcaggctcagcagctggtttgtttactcacttagatatcccactggccccagactctgcaaatttttgtcaagtatgtttttttaagttttccttttgttttaaaacaaaacacaggtgcagataattgcacaaaaccaaatggatagcttaatgaatcctcctgagaaaaacacccttataattaccacctgggccaagaaatgcaatttgctagcctctgtctaggaggatatgtgccccatccaaccacaggtaggcagctttgccattaatggatgttctccaaactcctgaaccaatggacaccatgtactgcaagctccttccagagactcaggactagatgccaccagcggctttgtgacagtaggactctagcaagacttctgaactgctgtcaggcacaggggctgggggtttgggtatggaggaggaggaggtcagtgagagcatctcttatgaactgctgccaaaactcagccaactccagaaacaatggctgggaatgacaggtccatggcgagaactttgactattgtggggactctgggaagagctgttccttggggtatttctcctgcctggtcctctccaggcttctgagagcctgggaggtctggagggaatgatgctgcctggagtctgatgagtctctctggcagaccttggacttcacccagagaagactgtttgccttggctaagcatttcagctctttccgagcacagaaggaactggattgtacatgcaccaaccctttacagagtgacagtgccatgctgctaaccctggattcgccttgaaggcctcaataagcagctgcttcagactggatgggctgaacctcacccagtgatgcttcggctctattgcagagcacctgcatgtggctgttgcacgtgtcttagagaacatctcctggctggatctcagtggccagtgaaagcatagccagaattcagatgcttcagccttacctagaagatgccccaactttgtcaacctcaacttaaatgataaggtcatactaaagattctgactatggggggctggagagatggctcagtggttaagagcactgattgttctttcagaggttctgagttcaattcccggcaaccacatggtggctcacaaccaccttgaatgagatctagttgctcacaaccatcttgaatgagatctagcaccctctgctggcctgcaggcagaagactgtatacataataaataaaatctttttaaaaaagattctgactatgtggtggtttgcccaagacacctataagcacagtccctggtctgtggcaatgtttggggaagtggtactgtcttgccgcatcatttgtggaagatttttttttttcgagatagggtttctcagaccaggctgactctgaacccacagagatctgcctgcctctgcctcccgagtgctgggattaaaggtgtgtgccaccaccgcccggccatttgtggcagattttgagaattcatggtcttgttctacttcgaattcctagaaatctgcttgcctctgcttcccaggtgcataagaacttttcatccatccttgggttttatttactcactccactccctcctctactctttattttagttaactttattccaggaaaaaaaaaaaaaaaaaaaaaaagaaagatctggaagttacttctattacaggaggtactgcagttttgtctgttttgaccaccaggtgtcgccacagcacacttacccatgcgtcttccattggtgaattcctgatatactaaatgctacaatttagtttcttaaaaacaaataaataaacctgtatttagttatatcatgcaccccaaaatggctcggagactctaatgacgattaagaggaaaataaaaaagaaacattaaccaggtgaagagggagacataggaaaaccgatgaaacaggaaccccagggatggggcgctcccagctgccatgtgtggtccacttaatgtaccaggaagatgtgtagtgttctctaccaccatccttccgccagaggctccatcgtgagtttcaaatgttagcgatttcatatctcaaggccaagtgtagtggcacaatcctgtaatcccaactctaaggaagaagagacaggaggatcactatgaattcagttaaggtcagcctgatctactgcatacagagttccaaaccagccaggactacacagtgagacactgtctcaaacaaacaagcaaacaaacaaacaaaaattaagacctcttagacaatgcctgtgggttactaaagtacttgagtttagttctgaagagagtcctgagatagagggggcacacaggttttgctagtcttctggggagattaaaaaaacaaatcttgtatgaccaggtctacagggcgatttagggtcaagggccaaatgagtttctggctgtgagtgccatgctccggactccgggatggaagctgagtcagggacttaaggagcaaccttgggttctctagctatggaagccaagcattggcgcaggccattgtcagccttggcagagccgggaaggctgatttgagcccttcatttccgtggggtctccagtgagcatcatgatagttgaatacaggcccagcggctttgctgtggaggggcccacaggagcatcgaggacatgcaggagagaccagagtggagaaatggaaaggttttcaccgtgagcacttggcttgtggtattttagctgctggcccgtatctcccactgtgtaagcttcagcaacgggtgactacttgagaggacggatgacctactccaggatgggtctaccgtgggaatactgcaccctcgatgcaaacatgcaatctgaatccacactggtgctggcactgggactgcagacggactctgcctggtgaccagacttggccgttcggtttcgtgggaatttgttcagactacaacatgtgggtgggagaagagaggcaggtaatttgttctaaggtaggcagtgtgtccgtgcgtgtgtccgtatgtgtgtgcatattaagaggggggcaaagatgataactataacccaccacatcatctgagatgggttctgtgtccactggaacccttaatttgccctccaatgctgtccctccctagagacccgttcacctcactccggctagctctcagctgtctgggtgttagctgagctgtccccccccggcatggcacaagtgtttctgcgctctttgctgtgacagaagccctctgtgctgtccctgtgttggttaccatattttcatctgtcatcccacttttccagtgtgacacccctgtaggctggtgcccaacaagccaatgtgggattcactgtccccgacgtgtgaggtggttacacttggttatcaacctgacaggatttagataccacaggaacctacccctgggcatgcctgggagagcatttccagtgggatttcactggtgagggaagatccacgctacagagtggacattgtaccagctgggtgatggtggcgcacaccttcagtccagcccttgggaggcagaggcagaggcaggcagatctctgagttcgaggccagcctggtttacagagtgagttccaggatagccagggccacctcccacccccacccagaagagtaggcagtgtcattccatggcctggggtcccagacagaataaaaaggtgaaggcaggtaagctgagcacatgactgtagaaggagtgggctcaccacagccctactgccatgtagactgtgcccttaaactgtcccccaaagtcaactcccccttccttcctaaaccggtttcttcaggtgtttcatcacagtgatgacaacagtagcctacttggtataaagaaatgttagctcctgggaggtcacctaacctctcttgggtttaggtcactggtccgtagaaataagaattatttctatcaagttttcaaaacagtcacataagatgtttatgaaggtgctttgtaagctggaaagctctcaagcacggcattgcttcagcactgcagagataagagaaaggggagagtgaattccgtcctgaatgggcaaccttaaacaatacataacacccttaaagcaggcaaccttcctgcaccagactcccagaaagagagaaacagagctaaagttcatggttggaaaaccatgtattttgtattgtgtgggggggtggggtggggtggagggaggggtggggggatgcatacagacttacccaggcaagaaaaggaagataactcagcttctcccatccgagccttttgatgtgttggcatgattcatgaggtatgacgcacaagctgcaaccctcaccagcgcctggataatagtaattcttttaaaagtggatgaagtaaggcggagaagtgacacaggtctcctcttcagttgagactgggggaacatggccttgctgtgttaccctggctggccatgaccttatggacttgtcattcctctcagcatcttgagtgcctgaacagcaactgagggtgggattctaaagctggacaaagagtacaggacggtcctgagagtgggttggttttgttttgttttgtagcccaggctggccccaaactcatgatcttcctgcctccacctccagcaagtcctaccagtgtgtgccatcaagttttgatcggaatttacaaacttctaactaaacccgaacatctttctgctgtaaagccaggcaacacaccacagtggcaaggttaggtcctgtgatttttgtcatcaagagatgccagtcagctatctgcacatgggtaagggtgtgcctagccacttttttttttttttaaagacagggactctcattgaccctggagctcaacaagtaggctagctggttggccagcaagcacatgacttttctctgtctcctttgtaattacaaacatgcaccgccatggctggcttttaaaacatgggttctgcgtcttgaactcaggtcctcatgcttgcccggcagctcacagagccaccttggcagcccaccccaccacagctgcttctgtgtcccatggcacacgctcctccatcactccttgacactgctggagccatgctattacacttacagtccagccttgccattgaatgggaattcatcaaatatctaaagctatttgagggctggatagatggtggggtggctaagaagacatatggctcttgcagaggacctgagttcagttcccagccggcacatcaggtgactcacaaccacctgtaattccagttccaggggatccaacgcctttgtctgacccccaagaacaattgccatcgtgtgcacttacaccacacagatgcgtatgagtaaaaatatgggccagagagatgactttgaggttagcagctggctcccagcacccagtccagtggctcacaaccacttgtaactccagtttatcaggggttctgatgcctgtcttccacgggcacctgcacgcacatttcagcccctcacagagatacacacatatacacataatttaaatcttttttttgttttcattttttttttgaggcagggtttctctgtgtagctttggagcctatcctggcactcgatctgtagaccaggctggttttgaactcacagagatccacctgcctctgcctctcaagtgctgggattaaaggcgtgtgccaccaatgcccggccttttttcttttgttttgaagacatggtctcactatgtagctctggctgtcctggacctcattctgtagatcaggttgacctcaaccttatagagatctacctgcctcttgcctcttgagtgctgggattaaaggcgtgtgccactacacccagcttaaaataaatcttcaaaaataataaaatagaacagagtattcacgatattcgatatgacttgtttcctttctaggtagttttttttcccagtgctggaactaaactggagtttcctatgacctaccactgagctgcttatagagccctgtgttttattttctttttaataatttatttaatcttattttgtatacattagtgttttgtctgcagatctgtctgtgtgagggtgttggatcccctgaaactggagttacagacagttgtgagctgtcatgtgggtgctgggattgaacctgggtctcaggaagagcagccagtgctcttaaccgctgagccatctctccagccccttattttatttttttaaatgcatataaaggctattgttttggcctggagagatgtctcagcctttcaaagactaggttcacagccaaaactacaaaagcattgttcttagcagaggtccacagctggtttggtgacgcatggttgtagttccagctatttaggagcctggaacaggaggatcacttgagcccaggaacctggcaatatcaggcaatcctgtctgaaaacaaatagaaccacagacatcaccagactgccaaacaaagttaagcaagacatgaggattcgttccaaagctgcatttctttacaggaagtttttgcaatacactgttaatatgactcacacatcaaagaattgtcaaaaccctggagactgaacagaacgtggttgctgggaaactaaagcccagtgaaatgattacttcttttaagacaaggaaagaaagcatgggatgcccgtagaaggttgaagatggtttacttgctctcattagtaccttaaaaacatttcgggctagtgaaatggcccagcaggtaagagcacttactgctcccgcagaggaccagaggttggttcccactgagtcacagcctgctgttgctccagccagggaatctggtgccctctttggacttcatgggcatctgcaatccccggcacgtttcacctccaccacccccacctccaccacctccacctccaccaccaacaccacctccaccatcaccaccatcaccaccatcatctccaccacccccaccacccaccaccccacctccaccaccaccatcaccatcaccatcaccatcaccatcaccatcaccatcaccaccaccaccaccacctccaccgtcaccaccgtcaccaccgtcaccaccgtcaccaccgtcaccaccgtcaccaccgtcaccaccgtcaccaccaccatcatctccatcaccaccatcaccaccatcaccaccaccatacacatgtaatttgaaacttaaagtttttgcaatgctgaggatcaaacccagggccttgtgcattcaagggaagcctctgtcccctggctatgtacccagccctctccccacagaagctggagagaggggagggaggggagccacaccttctggaatgatcctactcacctctgatcctcatgcttgctaagtgctttctgcatgatgaccctctgggggacattaaaatgtcacaccgtgtcttagttagggttactattgccgagatgaaacacagtgaccaaacaacttggggaggaaagggtttacttggctttcacttccacatcgtagtctatcactgaaggaagtcagagaactcaaacagggcaggatcctggagtcagaagctaatgcagaggccatgggggagtgctgcttactggcttgcccttcatggcttgctcagcctgctttcttttttatagaacctaggaccaccagcgaaggaatggcaccacccacaatgggctaggcccttccctatcaagcactaattaagaaaatgctgcacaggcttgcccacagcaggatctcatggaggcatttccttaattaaggctccctcctctctgatgactagcttgtgtcaagttgacttaaaactagccagaacacgcagggttcctcacaaattcactagcatctcacttttcatggtacctaccaagttatttcctaattcccatctaatctttgtgccgttgaagctgaggtttttttgtttgtttgtttgtttttgtttttgttttttaaagattttatttatttattatgtatacagtcttctgcctgcatgccagcagagggcaccagatctcagtcaaggtggttgtgagccaccatgtggttgctgggaattgaactcaggacctctgagagcagtctgtgctctctccagcccgaagcttaggttttaataatctcagttttataaatgaagagactgaaggctcagaaaagggaggaatctggccctttgttcatggttcacagtaatttgtgacgcacatgtgcacaagggcctgaagatgctacccatgtggccatttctgtgagcctgtgtggtgctctggagtagaggggacttctacatgctgctgggactgctcctctgacctgccccccccctgtgaccaggcataccctgaagcagtcaagagatgggaatggcctagacttctcagtctggctccagcttccctgagtggcccagagtccaaagtgatagtggcagtcattatctggggttctgagacactaatgaggtgtttgctcgtgcttttctgaaaatggcctacatcataacctctgtagaaagaaaaccttgcaacctcctggagagtttctgtcctagagcagtgcccactgacaccccaggggctggggaggcagccctggtctccagaatggtgccttacagtggaagacacacatttctggcccctgtcaagagcaaacatctcaggagtgttgtagtttggattttaaatgtcctccagagacctgtgcattaaaatcttggtccagagggtggctggctccaccgagagatggtggaaacgttaggacgtggggttactggaaagtcggaggtcactggaggccatgtctttgacggaattaagggcctggtgtcttgttcttcctttctggtcatgaggccaaattactccttatgctcccaccacaggtccaaagcaacaggaccagttgattgtagatataataaacccggttttattataatatttatttatttgggatccccaaagctataagccaaaatagacctttcctctttgtaagttgtatttccttgggcattttattatagtataagaagctgacttaactcactctctctcttccttttgcttctcagctagccttctatgtgggatgttcattttcctaaattttgacacctcgccgactgtctttgtccatggaatgtctctgttgatactgccaaagcggagccggagccgtgttgtgtttagggggaactcaaaggtgcttcctttcctttaaaaatggatcccatcgcatggaaataggaatgcaaatgcagggttttctctgtagaaagccaacctgcctacttgatactttgttgcaaacttgatcgtcccatgctttttaaatttgtatgtctgggaaaaccaaatcctattttcttcagcatctcaacaagttcatgcttgaaaaaagactaagtgttaatgacttaatttacacgctgtggaatgttccagttacaaagtgttaggacttctactataaaggaaagcctggggtagtgatgaggctaagcccacagagtgcttatctggcaggcaggcaggcaggcagccctgggttccatatccaacaccttgtaaagcaggcatggtggtagaggcaggaggatcatgtaaattcaaggtcatattcaaggtcagtttggggctacaggagaccccaatctcaaaacaagtaagcaaataattaaaaaatccgtttggattgactgcttcccagaaaagctatattaaaaaaggagcaatctgagaaataatagtttcatctctgacatgcctggtgagtaggtcacgcttaatagattcaacgacaatgtgtttctctgttcttgcaaatgcttttgtaggaatgtaatgctaaaaatagagatggaaataacatccatcaggtaaaaatacagtaatttagaaggtctgtcgggcactgtgagttctaggaagagcgattttccactgaggactgctgctctgatgacacactagatctttctggcacagggatgcttagcacttgacactagcaggtattttaactcacattgtctcagtgattgacactagacacagttgtccctcagtatccatgggggttgcttctaggatccctctgcgtatcagccagagtctgtgaatcctaaagtcacatataatctattcaattctttcatgcccttcaaatcaccttgggttacttatgatactagtaatgtgtttgctacccaagtcattataatgattttttttttagggaagaatgcttttaaaaggctgtacatatttagcataggcaacacacacacacacacacacacacacacacacacacacacacttcagtctagagttggttgacttcatatagcaaggacaccataacgatctgactatgtaatgcagcaaagagagggaggagtggttctttctctctcattcataggtataagctgactttgattctgagagatttctgttaaattgtcttgtccatcactgtatgactctaacaaacagttataccatctgttccaccaaaaaggatggatgttcttgcctgaaaggagttcagacatgaaaaagagatgtcactgcagtgtgtgtgtgtgtgtgtgtgtgtgcgtgcgtgcgtgcgtgcgtgcgtgcgtgcgtgcgtgcgtgcgtgcgtgcgtgcgtgtctgtctgtctgtctgtctgtctgtctgtctatgctgggtagcttgttactgtggtcaagaggggatcttgtacatatttatataaatatgaacatgtttctgctttcttctaaatccccacatctgcagagtttgggtataacagtagttaaggtggtgtcccatctctgaatcaacatgacctcctgggtcctgcggccccacctaactagctagagtctctgtccctcttctcagtttctgtaagaaagaccctttctgtctcacttctttggcctggggtgggcgtaggttatttaatataacagctgaggggctagtgagatggctcagtggcacttcctgccaagtctgatgacttgagttcaataattggggcccacatgggggaagaagctgtcctttgacctctataacttcactgtagtttatatgtgcacagaaaataaatgcaatgaaaattataaattaagggactgaagagatggctcagtgtttaagaacactaggtggtcttccatgagaggtactgagttcaattcccagcaacaacacgatggttcacaaccatctgtaatgagatctggtgccctcttctgtcctgcagagacacatgcagacagaacgttgtatacataataaatacacaaatctaagaaaaattataaattacaatgtgacatctgacttccttgaagaggaagagtgaattggacatgagccaacctccatcgccttcctctgagggctccaagaggtctgtagaatttctttgctgtagacagaactgggctccccaaggcacaaaaacttttaaagggaaggtgtggtggtgcacacatttgatcccagcactcaggaggcagagacaggcaaatctctatgagttcaattagtgagttcctggacagtcagagctatgtagagagaccccatatcaaaaataaataaataaaaacattcccaaatgtgtataacactagtgaatatggacatgcataggctccctgccccccacgttaacagtaacattgtgccggctggtgtcatggatgtgtcccttgtctttccacccaagatactttaaattccaaacatcacagtgcttggtaattaaattcttcagcatgggtttcaagaggacaatgacgcccacacatggcctgccagagtcttcaggggataatctaggaaaagctgagaaacagctgccagaagagctgtggacactcaaaacagctgggaaaaggccacacccagggtggcagcagcattatcagaagggggcaccaggaaaaaggtctctcttctatgcttggtgctgggcactgggcaatccagagcagtagtctgagaccctcatgaactcggggaacaggccatgggactgtaatggaagatggcaatgctgctttcagcaagctgaaaacctactaggaaccaaaaagtatacaagggaactttcctagagactccaggtagtgtgtagggcattagaaagagcctcgctattggccattcagttcttctttaggaccgtcaggtgttttagacagagaaccacagcttcacagagttaaacttggcataaacaggagtcacacaccttaaaataataacctaccccacaatggtgtgctaggaacgtctagggggaacagatgcactagaggcccccccaaagatggagggaatacctgaatgtgtaacggcaagcactgacgtgtgctatcccgggttcaaacacggagtttgaagtcacagctccttcatgtaagaaattgctttctaaccatggggttcttagctgatctgcgttaaagtgacataagacagactaacaggagaaaaactattttaattacatttgtacctggagtcacacagaaatatatgagggtgaaaaggagcagggagagggacttttggttgcgggtggcatgtctgtctaccacacaagcctcctttcaaaagtagatgtattcacagtctatgttcactctttttcacacttgtatttattttttggggggggcgggatctgtctggagtgtagggattaggtatggaccacatacacagccaccatttcacttctaaacccttgaagtgctttcattctgcactgatttaggtggcgttcattttggtaattacaaggcgggaggagagtggagaaaggctctctaggaggctttaacctttgttagataaagcggcctgaatatcaacttaggccacagaatgagaggttcatgcttggacaactgaggccaagttaaacaggctttcccaagtcgctggttcttttagttctaaacattcaactcgcccaaagggtagattttgtgttgacacgttctgaatcccttcatctacatgggttattgtcacaagtggatgtttttttgttttgtttttttaaacctctctttgttttctcaatcagtaaaaacaggactcttcacctgggaatcatttcctgtgaggattatgtaggaatttatccccagtacatttgctttttgccaagtgtatgctaaattatatatattgttagtcgatttataatatatatataaagcgactaacaatccataaggcctaaaactccaggtccacacagccagagacccagggctcgctctgatgttgcttagtagggaggcagagtaggacctcaggacctcagggtctttgttatcatatctgaagtcaggatgaaagagctcagtccccgcaccccttctgcttcttttggttgtgataggggctcacgatatcccaggctgacctggaacccctgagtgccagtgccgagattacacacgtgccactgggcctggcttttgcgcactggctccttgacctcaggatgcctggggtctctggatgctcctccagagctaggctggcattgtggagtcaccctccacgtttccttggcaacctaacccgaggggggcggctgcgggcacacaacccctgaaggccgcggagggacgcagatcctctggtgtcctggaggccaccacagagctgcgcagccggtggcttcccgagttgtcggctgcgggccagcccatggcggaggcgcggggaccgcggcgcgggggcgtgcagcacgagctgctggagaaggtggcgcgcttgcagcggggcgcgcggcacgcggaacccgagctggcggcgcgcagagcgacgggcgacagcggctcgggcttgggcttctggtgctggcggcggctgttcgcgcgcggagcccggggggcgcgccggaagaagggcaagttcgcgcggcccggcgcggcggccccggagcgcagcgtgtggggaccgcccggcttgcagaggctgctgcagaggctggcgacgtggcggcggcgctacctgcggcgaggggagcggcccgagggccgggaggagatcccgctgctggtgctggaccgcacgcgggccgccgactaggggcgccccggccagcttcgcccgcacacgcaccggcctcgggtcggttaggttttgtaaaggaaaacaaggagcgacaataaaccccgctctgtatggatgggaggacgaggatctgggggcgtctctcggggacctgagcgcatcccgggcgcgggagggaggcgtccgcttggttgagcgcttcggcggcggatgtcaccaggcgccgccaggccggtccccccatccccccgctccccaccccgggcaccgggtgtcacgtgggctccttgacgccccgctaccgctgcccctgcccctgggtggtgtggaattgcatcgccgcccttggtttcatttgtttatagtgcagatgtggaacaaacagtgctgttaaaaatcaattatttagggccttagaggatggctctgcgggcaaacctgagacccgagttcaattccctgaacccgagtaaaggtgcagaaccgactccacggagttgtcctccgaccgccacgtgtgcagcagtaatactgggcaaaaatggttattctttcacaatttcatatatatgcacacccacatatacgcttgtgtggttacctcatacgtcgatcatatcctaccctttgtcctctcgttccccccccccactctccggaatccgtttcctcaagtccctctcacagtagtaggacttttctttacaggttcttaggagcctttgagccaacattagaagcaaggcttgggggtgggggtgcttaggagtgtgaggattactgttagagatgaaagcaagggagcggccaccaggagatttcctgggggcgggaacgggtgtgggtgggtgacctttggctcctcttcctcaataaaaacttcctaaggataatctggcctaacacacctgccaggaactgtcgccagtgaaagccctcacttcgaagcactctcaaggacgcggaggttaataagctaccgcaatggtctttcctcaggctgctccccgtctccatcctcgtttttcactactccacaggagtggaccttcctagaaagccgaagacggtgtgccctggtgttgctgtctctgttaagaggctttggagtttgccccggccaatacctagagatccacctggggggaaaagcctggaaattatcataatgtaatttcacaccatccaggggcaggggcggtggcgggcagggagtgtcaaaaggcacaattacagccctataaagaacttaattgtctctggggtcctaggatcaggtaacaatgcgttatatgaaacagtgatgttctatgagccacgcagaggttggcttttaggtgcaagcacacagaacttaccaaaatatccatttcaaagtcactttcctatactgtgcggtaggggaagaaagcacaaagaaaactgggtaacacggttgttttctgttgtaaggattgaaacggggaagctgtcacagtcgtgagtcaaccagcaaaggaaacttcatgctgagcgaacctggcctgtttcgggcattttgttagcttgtcagagaggcctcagcaggcttgcgggccacggaagatagacccttcgagatcagcttggggccccacctcccatttccttggttacaattttaagaaagggacgtttcacaatcgtccttccttcaaatttaaaataccataagacaaagttgggggggcatcagggttttgtttaggtcccttaaaggaaaactacctccttttgattaaaaggttggaatctggggccaggcaaggtggcgaatgcctttaagtccagcattctggagacacaggcaggtagatttctgagttccaggactatacagagaaacccttgtctgaaaaaaaaaaaaaaaaaattgactctgagttctacctgtggccagaggtggagccatggattttaatatgccttaaagattagaacgttattgccacttccaactggcctgtcagtcacatggccttgctgatcacccctcggtaaaactgattcatctgaagacaagattggggggagattactgccaaccccagcaatttggctgctgcatgtcttccaatttctgtaactttaacaatctgtttgatgtctttgaacgtggtaggggtggttccattttgatctgttggccctagtgttgagctgagcctcaaacaatggcctttcatgatttttaaaaggagtgatggtggaattatggaagaatctggagactgagaatagcaggaaaagcaagacatggtcagaacagtaggaccaggaacaaaggcttgctgtgcagcttctctgcagttctggtgtagtcttgaacagttggcattttttgtgagtttctttatgctgtcattacccagctagcttatagagtctataagcctgtgacaggagaggctttctttttaaaccacaagtcatgaaacttcattctgaaaagaaaatctggtttttgcttttgtttttttgatcttgtgctgaactgattgggcctcagatccaatgacgcctgaatttaaagactgttctgtaggtccaggagagtcctctgcatggagagactggatggactactagaatatcaagctgctaaaccctcacacaccaaaatagaagtgctgctaaatgaccgacaagaaatgccaaccacttagtgcttcctggatttatttcttttataaagagccaaatgaaaccacagttcattttctaacctttaatttgaatgcagctgcgcctttgtgttttggccgttctgtggactccacagtatttgcccctcactagactgaagttagccaagactttggtttggtctgtagggcgcatgctctcttcctctccccttcctagctcctccccctttgtcagttctttatctaagcacaatagttgttgcagtgatttaatgaacatctttctcctttgactgaggcaccacacccagtctagcaggtttggtgtggctatgagccctgagctggcttgttaactaacggtcaggtgtctccctctagcgcaacgctcactctggcagtgttctccttccctcttgactagctcaaggctaggaattccatgttttatagtgggaacgtttaagcctctgggcatagactagaaccacacggagctgatgtggaggccatggaggagtgctgcttactggcttgctcctcaaggcttgctcagcctactttcttatagcacccagaaccaccagcccagggtggcactgtcatagtgagctgggccctcggccatcaatcaagaaaatgtaccagagaagcatccgcaggtctgtctggtgggaacatggtctcagctgaggtttcctcttttaaaaatgaccaagttgacataaaactaaccatcatacaggctctcaccagaccccagcttcccagacagaaatggtgagcatactgctacagtgctggctagcttcatcttttagaggaattgtgtaaatgctaggttcccccaggtgactgctgcagaaatgttagctagaaggcccctagggtagggctggctcctccctgtgcttctcctgagcagctctctctgtactcagcctccaggtctcactgcagatagcttcccttgtcctgacctgaagggacttacaccagcaccatcagtgacagtctttgacaaagttagatgtcttctaatattcaaggcaaacccttagctatgagcccctgaaaaacaatatacttccaacatgccacggcacagagtaaatattcccattcagattgggaatgaagtgacaaaaggacgtaggccaaagcacagccgaaaacacaccaaagcctgcaactcagtgtcccgggcctggggctttggtggcatcagctggcctccagtaaccttgggcagcctgcctctccagttctgacacctctagcatacacagtccctatgcacagctttccttacccttcaggagtgaggtttacttattaggagaaaaggccttaaggccaggatcaggccttgagctgggacatgagaaaggaacaagaagctgggcagtgatggcgcatgcctttaatcccagcacagggtaggtgggggtgagggggtggggtggatctctatgagttggaggccagcctgctctatagagtgagtccaggacagtcagagctacacaaagaaaccctgtaggaatgtatcaaaaccagcataaagggaaggcaaggcttccctttaagacacagacggatgcttcacaaagagtgagactaggagagccagggagaagtcagaggagccttgggggtgaaacagaagaaatagcttgaactgagctgtgacacagggctggaaaattaacatccccttgaggtaggccagtgagggtgtactgctggactagccagctgagagcaggcaactgcttctggtaggcattatagacaattatggagaaaaaaagcatttccagtaccaattgacaataccagaggagagggggcatggcagtttacagcgtcacatctggggcagcagctgcaccagaattgccacttgattaaacttaggctaatcaactgtctttgcccagatccatccatcttctgcacaggccaggacacaaagctgagtagagatacggaggcaaccaccaaaccggcaccttccaagtctcctcccggcactagtctctgttccctacagggattccatactgattttagttcactgttttccagggcaggggcaactttagtggattccttctgaccttttcaataataacaatccccacttcatccacagatagggggactaatgtgaggattctgccaactctgaagtacatttgtcccaattatacatttcaggactgaggaaacaaccacctcaggatggttccactcagggaactgtgatgtaagggagggtggcccctcagaatcgctacaggacacactcagtcaccaaattattagaacaaaggagatttattaccctgaggggcaagtggggggggctgcaaaagcagcaacgcagcaagcagcaagcaagcaggagtggggttttaaggagaaaaagggagagtttgtgcaacggtgagttggtaggttctaattggacatatgatccaaataatgaattttggtggttggactttggtgctttgtctcaggcatgagccagtggccagataagagaagggctttggtggttagcttgaggaatgtaatctaaccgttttcagtaaggaggagacgggtaaaaggcaaagctgtgtttgccatggttgggcctgtagttaccctacttgggccagctagagcccttcatttcttaagtttataagaagaggtaaatgttttagatatgttagcattattactgtttgttatctgtatggaaatctatattgtagaaagggcagtaggttcatgtttttgggtcatggtaaaagtttgggaatctaaacaatagcatagagggaaagaaagaaatctgaaacagcttttcagttctaggcgttccctaggaatctgtatcctagacagccccaaagtggctagcccaagacagcccagcttcactgatccgccaacgctgcctgtgcttcctttgccccagatggtcctgacacagcctgctcttcctgaccttgaccaacaatccagttcccttgagtctttaacattgatgcccaatatcagcaggaagaagccagagagaacgatgcccgcttacctaacacccatcaatctagtaataaaacaaacaaacaaagaaaggtgggaatgaagggctctagcaggcctgagcatagcaaacaccaaccggctttgccttttaccctactcctccttgctaacaaaatggttagatggcattcctaaaaccagccacaaaggtccgttcccttatttggtcacagactggttcctgagacaaaacaccaaggtccaataaaccaaattcattatttggctaacacgtccaatcaggacctaccaactcatttcacatccagtcaggacctaccaactcattctagcatagacttccccctttctcctcacaaacccattcctgcaaaaaaccaaaacacgcgcttgctcgctgctactgctgctgcttgctgtctgcatttgcaggcccctccccacatccctccagggtaataaaatctcctttgtcctgagaatttggtgtctggctgtgtcctggaccaacaagtggggagaggtggggtgggagggggtggcgggcgacctctcttgttgcactcagtatccactgtaagctggattttggttgaaattcagctcatctctaacttccataagctccacattgattggaaggtcatgatgctcttgggatccccagaaatcaacatctattcggtgccaggggctagtaggctctcaaagttctgatgattttctctgccttaagctgttatcttggtagaaggcagtaggttctttttttctatttaaggaatgtagcaggataatttctcaaagggggtgacttcccgtcacttggaatttctagtccataaaggacttaattctggtatggcggttagaataggttaaggctcacatagactcacatgtttgggtggttggcccatagggagtggcactattaggaggtgtggccttgttggggtaggtgtggccttgttggaggaagtgcgtcactgtggaggcgggctttgaagtcttataaactctagtctagccagggtgacacagttgtttctgctgcctgcagatcaagatgtacaactctcagccccttcttcagcatggtgcccgccttcatgctgccaaatgaactaaacatccgaaactgtaagccagccccaattaaatggtttcctttataagagttgctgtggtcatggtgtctctgcacagcaatagaaacactaagacacctggcggtgaaggagcatgtctttaatcccactacttgggaggtaggggcaggtgcatctcttctgtggaatattattttactaggcaaagatgtgttatatttgtttctgttgcagcatattattttaactgtgtaaaggtgtgttacatttgtttctgctgcatttgcttaatgatgtaaagatgtgatacatttgtttcaccttgcctgactaaggtacctgactaataaagagctgaatggccaatagctgggcagaggaaggatgggcagggctagcaggcagagagactaagtaggaggagaaagctaggctcaagagaaccagaggaggagagaatgagggtgggagggagggaggtgccctgggtcagaagccaggcatagagaagcagttaaagtcagatatacagaggaaaggtagtaagccctagaccaaaaagtagataaagagaaacatgttgttattaaaagagctagccagaaatgagcttacgctggaataggtattcaaaactgtgcatgatttggggaactggttggtggcccaaaaagcaaaaacctggtacacatctctgtgagttccaggccagcgtggtctacagagtgagttccaagagaaccacaatcagggctacacagtgaaactctatcccctgctccctacccccaaatgtcttgagtttggaaattggttgtggggccatgatgttgctataatttatggtagctttggttcacttgctttggaatttttcctgcctatacaggtctagcatggattttgtagattcccactgtgtcatcttgaggacaccatgatcagtaagcagttagaacattgtgatcactgaatggcctctgctgccagtacaacaggaagtctgccaccttacccttggccatccagagctgctatttggccctggctactctgggctccatttcactacgttacctgatagagcagctacagttccctggcatacagggaaggacaatggcagagctcaagtgtgctggtgcttgcttgcaggtcatccctcctgtggcagcgccttttacccgcaaatgcattccagcattccagtttctctgtccgtgtgtggtgtgtgtggtgtggtgtgtgtggtgtgtgtggtgtgtgtggtgtgtgtgtgtgtgtgtgtgtgtgtgtgtgtgtgtgtgtgtgtgtgtgtcggtgaagccaaaggataccagcatttccagcttatttacagaggtgtttggatctatactctaaatatagttgagccatcaaataaagattattggcaccttggtttttgtttgtttgttttgttttgagacagtctctctacatggcctggcctgccctggaactcactctagaccacagtggccttgaactcatagagatccacccacctctgcctcccaagcactggcattaaaggcatgtgccacacacccagaggcatcttgttttgtttttttaaactgagggaccttaacattaaactcagactcagctcaatgaagctatgatgataaatctagcctgatacaattttatgttccttccaccattatcccacacccctaaaatctttcctatgcatgctccccagagctcaaaaattctttagtggtgtagtgtgcctctatatggctcacactgtacatcacactgtaccacactgtacctcacactgacatgggcagtgtcagctgatgaagacaggggcctgtattagtcagggttctagagtcacagaacttatggaatgaatcttcccccacccccacgggaatttattggaatgacttacaggctgcagtccaacaatggctagctgtgaatgaaaagttcaagaatccacatgctcctcagtgagggagtcctgaggttggcctgatctgacctagactcagccaccaccatcctgttttggggccctgagctggcccatctggagtgtccactacagccatccttcttttgaggcttcctttttgggtcctatctttttagtgtgctatttttgggaacccattgactggtccttcttagagctaacctcctgcctaccaccagtgcccaaatctgtgctaggtagggttcttcagaggggcagaactagcataatgtaggtataagatttgctagattagcttgcgcttaagggctgtgtggccctgcagcagtcacttgcatactggagctcgcagatcacagacctggaagcctctagtcccagtctagtcagtgccagggcctggagctccctggggagctgtagatacagtccacaataggttacgaagctggagtctgagggcagggatgaactgccttccctcagatccttgtatctggctgccccttggaagctgtggtcccgtgagggcatgccttcatctgtaaatcttctctggaagcatcctcatagacatgcccagatggtgtcttctgggtgatttcaaaaaacttaggttgacaattgataacaaccatcacaggtatgaagcgcctcccagggactcgaaattgcctccttggccccacagctggtggcactgtttagagaggttctggcaatgtggaggcagaacctagctgctggaagcaatagctgctgaggtatagcttgtctacaagaaaagtaatactcattaataaccaggaatgtatacctcaaaagtgggaagaggtctgtccacactcagcagacatgggctgtgtcacctgatcaagacacaaggaacaggaactaaaccctgggtggcgagactgtcaaagccacatggcaaagcatttactacctcaggtggcttggatcaagtatgggctctgaggttgtgatgaatcgtgtatcctgtgggaatgaagcgctgtgatcttcagtccgtttgtggaagaaaagcagccagtcctcaactgacctgtcagaaaaacttcccaaatttgtgcaagttttaggactatttggtgtcatgtccaacaccatagccaagcctgcatgctaccacagaggacacacgagatcacaggtttctctggagtcaacaggtttttgaagacattcttttgtatgtatgtgtgagggggtatgtgccgccgagtgatgtgatgtggaggtctctccttccatcttgtggggcctggagatcaaactaagatcgtcaggcttggcagcaagtacctttacctgctgagcacctcacaggccctttttaatttattccttaaagctttgaaagtctaagcaggctctgctgttcagttttgaaacattcatgagggccattctacagacaacaaagcaaacacttaattggtttttaagtttttttctttctttttttttttttagtcacctcttgctgggtgggtcggtcagttggtctcaaactcacaatcctgctttggtcccccaaaatctgtgattacagctatgtgcactgtgcccaccttgaccaggtatttttttttttaaactttttcaatgttgagtgttatttttcccattggttgtatgggaggttagtatgatttccatctctctgattcctttagttatgaaaaatagttttacggtgaagctctgagaaatttcattatgtgatgttataagagaataattggatcatagagttctgtttgattagcagatggagagagggctgaacaggattttatttaataaaagtgtaataagagtatattgtttttctacatcaataagtttgaacacatacattcctagcagttcctagagagagcctcacaaccgcagacatgccttacagcgtttacaaagtattgctcatcagagtgagaaagctgcaacagtccaaacatccatcaaagggagagtaaacaggatcatggtgtgtttgtataatacagtagaaaacaatacagccgtggaaatgagttagaaccatacatattaatatgcatgaattataaaaatagagaattttaaaaccacgggatatatatgatttcatttatacaaagctcaaaaataggcatatgcaggtgacaaaatcattaaaaaaaaaacccaaagggacaatgtacaggaactttaagatggtggttccccttctggtggaaggaagaggtagtgatgggggaggggcctagacatgttctccaggcctgttatttaagctgagtgggaggtacagagtgttactcattttattatcctttaaacggttcatacaattatatcaaacccccccccccccagttttcaaacagcgctgggctgaactcctggctttgtaagtatcaggtaaatgctctgccacttgctaccctgggagctacacgcccagccctaaattctattgtatacatcattcaaaatcaaggtgatttgcaaaatagtgactgggacatagataagagttggcagattttggttgtggagatggagaggtttccctttgtcatagcaggactcaaggggacattgtagaggaaatcctctatgccacctgctggtaggaaagaggggtgagaagtgggagtgatggagagacaaagcctggtgaggtgtgtgtgtgggagcatctgatcaaagtagggagcacctcccatggaagctcccatggaagcagtgtctctggagacaaatttagtgagtctgtagattgagagatgagaggccaattaacctgacattttttttactgaggcatcagtgagggtctcaattgatatgtgaagggaacatgttggagccacaaggagggagaaggcatgaggggcctccaactgggaagctgacttccaaggggccaagagcaggccatggtgcagtgttgagtgcccctgctttgtggatagaaacataaggctaacccagcacacacagtggtagctggactctggcagagtctagatcccagttgggctagtgatccagataatttaaataaaggggcactgaagtggcagagggatctgaggaggaaatgacttagttgctggccatggatttggtttgagtgaaaggaaaaataggtttgggtgggttaagggagatgttagtgctaggtttaatggctttgggatcttgcaaaggccaatgacttctagtggtgcaatggaccagggtaagcctaaagttaatggtcagaaatgcttggaatgaagattccagaagtgatcaggcatggctcatgcctttaatcccagcacttgggaggcagaggcaggtgaatctcttgagttcaagatcagccttgtctacaaagtgagttccaggtcagccagggccacacagagaaaacctgtcctgaagaaacaaaagataccagaagtggtttagaccattcagttcagggttgaagtgacagagagggactgggacaatgacagtggttattaactggggatggatggtgaaacttgtgtctgtagaataatgacctgtgtggatgtagtcactgagaatgaagacaagaaaaggctgagaggaagacagaaagatcagaagcgtgtgaagcagcaggtggcatctggcaaaactggacagctcagatccagctggctggaagctctgtagtggaaaaatgactgaagcagaaacgaacacaaaggtttagagggcagggtgtggctgagatgcttcttgaaatacaccaagtgtcacccactaaggcatttttgcctgccacattagaagtgtcagaggggacagtaagaatgaacagctagcaaatgagctatgtgcagggtccctggggatgaaggtctgagcagtttgcgtctttagtaatgacataaacatggattgctaattgatggaggtggcctttggataaaattgcccagccttagccagtggacttggggtttttagaccattctctcccaagtgctcaggtttgttttattttgtggttaacttgagaaatcctgtctctacctctactgaattttgtaggggaaccaatgactaagtcctccaatgggtcacctgtccaggctgttgtgtgattgcaggctaattgcctctctactaattaagtgtcctagggcagccccaaacacatcagaggtaaaacaaaatgattttgctatttattatcttcagtctaagaggtatgtatgtatgaatgcatacatactagggtactcctgtggtgtctgttcactgatgctggcagacgaggaaggtttgttttctacacttgattatggccaagtctggcagctctgcttcctcaggccatattccagctttgccactgtaaaattccatctcttatttgagggagaagggcaggccacctacactgccccccaccaggtgttttgcctgcatgtatgtctgtgtaccatgtgacgtcaaagaggcagaagaggacttctgatccctgggactggagttacaggaacccaggtcctctggaagggtagccaatgctcctaactgctcctaacattcacctcgaaactgcctttcatttgttattctcatcacacatgtatgacaatacacgtgtattgggacagtcaagcaatctgcattcaaggctttgaggaatctggcttagcactctgggtacctgtatccaagtcctctgactcacagaggttccaagggtagcctgagatccagtgagggtgtcagaagcagatgaaggctgtcctgagactaactccactgcctgcctgtgagtctgggattccatagaagacaagtcttcctatacctgggagtgctccccagtgtggaaaaggctttgaaatggcagccctcaacagcatgggagggggtcactctcaagtgggactatgaattcttctaagccagggcagggctgcaaagctgaggctcatctggtctttggaaataaacaggtccctgaaccagtagagtggtggcttctaccatttctttagtgttactttggtttggacaggaaggaaattgctcagatgtgctgattgagtcaaggtgtgttgagaatgctcagcagttctctgttgtggaatatttgtttaactaggcaaaggtgtgttgcattttttgtgctgcatttgtttaactatgtaaagatgtgttgcatttgcattacttaaataaaattaacctggactcagagaggcggagttagcaactagctgacaggaagtagcagaacacgtttttttttagttggggcagtgtggaaggagaggggcttccagggcaccagcagagagagaaagccagttgctactctatctgagcttgcaggtttttgccctaacctttgagtctcaagttttattagaatgatagagatttagttaatgctgcctttagcggcatcagcagagcaagtgtctgagggaacagaatcctcccaggttatggcctgagcagcagggccactggtagttttaaagtgcagccactgtgacaaaggttgttttctatcagtaagaatgttaagtagctgtttgctactaatttaccttttagaaagtatagaaagtcattaaccttccttagcacagacttctagaaagttagagcaaggccagtacacaggttaaatttagggacaattaaaaactgatagctgttccctaatatcattggcatttctttgtttgtttaaatagagaggacttttaagttatttagcagatctgagtctgttaggaaattaaggtaagagtcctattttgtatccctgaggtgagaacagcttagttacagtatatcactcttatttggcagagtggacaaatatgatcttggtagagcctaaaaactattaatttacttgataatatttaatttgaggggaaacgtttcaattagggtaggaaaacattgcgctaggtacaaaaggccaatggaggtgaaaggcaaaggttcaggttagaagtaccaagcagaagaggttgatggcaaataaggaacataagcaagcaggctcctgcttaattgctgaaaggggattgggaaagccttccagtcggcccactctgccgccactctccagaaacaaaagtaattaccgtttgagtaagggaagctgtgaatacaaggaggacagggtatggaaggggctggccgagttcctgcagagcagatgggattcctggattttaccaaaaaaaacccttcccagagcaaatacagaacagcactgtctcttagaggtcagaaagaactataaaacatttcttataaaagtagtttttaataaatcgatgtatttcaatgttgtaacatgataacccaaatgctatatcaaggtagcaaaagtgaaggttcctggtgttttagaaacgctgtgaatgacagtacacttgcattcaacttcacaagaaattcttttcaggtccataaagattcactgacagctgtcccacctgttgacagtggagatgtgtgtataagactgagcagacaatgaaagtctaacaatggagctacactctcaaatcatactgacaagaaccgcatgtaaaggcaggatggccaactgctgacagagactttcaaaaattagccatttaaagcaaacttagcatataccaaagctataggaaatgtagaatggagccatagacgacacatgggttagagccctgaagcagtgactgtgtttctacccgtcttgtgatagaagcagccatggaaacagagttctgcagctgtctgtggtgcctagtctccacacacacacaacgctatcaatggactaaccctggaatccctgctctgtaagatgctggtgatgggtaggttgctattgctgtgagtcagagcaatagttggctggagttcaggcctggaggtgttctaggacaatcaccacctctacagccctgtgttacacttctaaagctgatgtcccagtgagggttaaaaatccaagcatatttaaaatgagtaccagaaaccagctgtctgatctgttactgctgttaccgttcaacctaccaggagaaatggtttcacctggttacaactaaagacgctgtgtccgactccatgtattcattaccagagttttgacttggaattttcttcttatgagttctggttcagaacaaaattgctttcttccaagggcaagaaaagcaaaattaattaaacccattcttaatttgcactgtagagaaggtcctcactaaatgagattttctttctctttcaacctcaagtacactagactgcaaggaatctcatgtccagaatttgatttgctgactttccgagaactggtgcgggcactgttattttcccagatctttatatacttcaatcttcaaacactacagatagacgtgagaacagcaagtcgcttgtgtattgagctgctgagatctgcgtgagcagaggagctgtttctagctatttacccagacatgtctgaggggccatttttctcttgggtcaatagcagattcaaaacatttatatctcaatgacttagaaatacttccatccatgttattaattaaaaacaaaaacaaaaaaaacccaagtcaactgcaccaagcatttcctactaaactaggcttgagggctagggctcttcttttagagaacaacctcctggagagcattagtgttttgtcctaagtctcattttcagacctgaaccaagtcaactctttgtaaagaccgaatattctgtcttgcttcacggttcctgatacaaaggctctgccccgccccccccccccaatggagcagagtaacttgcaacggctttcctctctggaaacagaacagtcaaacagcacaaagtggcttcattttcctcaggccagtgtttataacccaaggtttactgtccctaaggagggtgtgcttacgttaagtatcaatcaaaatcagctcatggaaaagttaaagacgtaatttacttaaagatatgtatcttcgcatagagaactgtgactttcatactaatgaagtatgtaagctgcagtcagtaccttggatgtttctatgctgcacccactactttacacaggacactcactcttaaggcagaacattgattgtgacaatgaaatgattggttcttacatccaagggtcacctgggggtagactctagcagacaactttcttactaaagaagacttagctgtatcgaaaacttcattcctaagattatgttatgtaagagacacacatttgagaacataaaaagatgaatcagacacacaaaaatatgattttccaacgggagatcagtgaaaatagaatttctattatgaggcgaaactactctcatcatgaactaataaactccaataaaccatttctgatatggtgtacacaaagtattaaacattaaagaattacctttgggggggtgtttctttagactctagttttcaacgtctagtacaaaaggtagcctggctagttaaaaaagcagtttactgtcagtttgtactgctgctcaggaagctaggttaggacactcctaccccaccaaaaacatcctgtgcagggaggagtttagtatatattcaaataaaaatgaagcccctgccccaacacatgtgcaaaaacacttgtcagttataagaataacttccatgaaaacatcttcactatagaattgaggcatgaagccaggcagatacaagagcaccaccctgctgaggggggcatatttgggatgaaaccagtggctccacgggcacctaggaaaatgtgctacttagaatcggaagggagtggagaggaactgacccagggccccaagccctcgggctgtttgtgcgctccttcatgccaagccggtttggatccctgtatctggggccagaaatggtaaccaaacaaatacaaatctaatgcacagctcttaagcaggtgatgggaatcataactctgtaattacctcttcatgtgcctactttttatgctggagctctggcaattttcaggatgtatataaagatgacctgcctaacttttgaagatgaagattttcttctttcatggtggtagaagtccatgcaagacttgtaaacagtgatacaaaatactgtaaacgtaatttaacagagctcatataaaacacaggaagtgaatccaaatttacaagtggattaaaaaaaagaaaaaaaaaaaaaaaaaaaaaaaaagagggcagcttcatataaagttttccctcctgcgccaagtgaattttcttcttcttcttctttttttttttttgtttttgtttttgattacaaatataatcctgagctgaaaaactgggatttgggggagagccatctttgcatacaaaatatccaaaggacatttactctattttcttttctctagtactattcagagacagttctgaaggtgtgactttggagatgctcatagtttagtgtgacgcccagttctggcagcagctgcaggacttgccatggctgcggatgcggctgcgtcctctgcttcttccagctcatcctggagctcttggctgacactagactgcagtgcggctggagtgagccactcctttgggaggcagctctgtaggaagggtatacaggagctgaagtaggccagtcggttgatccagcgaggaatctctttcccacaaagaatctaaggggggagaagaggttaatgctgactgtcttgctaaggggtgggtggctgtaagagaaaatatagtgcagaccagcttgtggtgtttccgctctaggctgctgacagataagcagagccttcactcaggacccctgaccctcctgaaacccctttactttcagctgtgtatttttttttttttacagttgtgaaatcaagctaattctgctcagcttttgtctgtcttggatccttgaactactctgaaacacataaaattactgtgaacagtatacagaagaaaaaggcttgttagcacaagatgttactagagtaagagaagcaagcctcttgggtatttttgtcaaatctttttccaggttcttttctgctctcccaatttctaccatcccactctgccctgggtgcattctatgcctctgcattcaaccatgacccatttgtttcaaggacgctcagatggttcagaaagaagtgtccccaaatgaagactagctccatgataactggcagaggaactttcatggtggaagttccacccaagcccccattatctccctccaagccctgctgaatctcagaaagcccgccaaatggtgacctttccttctgaggagctggaaggccattggaaagtgatgtatcaattaaatgtgggcttttctaactcagtttgatttggtatgatttggattgctgcatcagcagagaggcttatggggtgtagaaacttttcagggacagtggtcagaacaaggcatggaggcctggctaggcttcagcctagagactttagtggacagaagtaggtgtcaactgggattcttcttggctgatgacctgctgcgcttctctgcccactgcccattcttagagtacttaggactggaaatcttctgcctacttcagatagtgagatgcagctcaaaatcatggtgactttaccctgtatctcaccttggctctcacaaaaaaaaaaaaaaaaaaaaaaacaaacaaaaaaaaaactaggctcaactgaatccacactagtttcacatcatgggatctgaagctagtatctgaaatatctgcaaatattaggttaatgactttggaagaaggcttccaagtttcttacactaaagtagttaacatttagaaagctagcaggtgtgcaatactttcccctaagaattcacagcagcatttcttaatcccttttctatcttagctaaaaggaaaatgaggtggcttcattaaggacaggtagtgtactctgaccatttgattacccatcatctatcacagtgcctaagagcagagggaggcaggtgggtacttaaatatgtttaaagaatatttatgtgggcacgagttgggagaaagctgagcaatgaactcactagatacggttcccatctgtttatgcactagcaaacactgtgtcttacatttgaaatagacccaggagtatctgcatagatattaaccacataagaaatagttaagaaaactcaagttaacatgacagacactgctgcccattacacaatctccttctcaaattctggttctattcagcaatctgttgtcttctatttgtgtttcaggaacgctgacttcgccccagttcttagggttgggaagactgaccaacctaaaacagagtctgtgataatcagctacctgcatctatagatatgagttatgctgggatacagccatatctatttaattactgcctatgcctcttggttacaatgagaagaggcagagctaaggtcatgaatggctcacaagcttaaagcacccactagctgtctctttataaaaagtttaccagttcttgagtttgtttgtttgttttttaaatttgttttaaagaatgttattttatgcatgagtgctttaacagcccgaacatctgtatgccatgtatatacaagaggggttcagatccctaaaactcggagtcaaaacccattaatagggcggcgatgcacacctttaatcccagtgctcaggagacaaaacaacaacaacaaaaacaaacaaccccccccaaaccattagtatgttattcagcattgtaactacaatttttttttaaatgaaataaaccactagtagtgaggtaactgtgaaacttgtcttcaaatacatccgtgtaaacggggacatattattttttcctatggctatttaccaaatagtatttggtttatatggtatgaagggtaatattgtcaactgaaccaaccaccaaatagataatgctctgggcaggtctgtgaggatgatctaggttagatctttgaggtgaggagacataccctaaaagacgacaacactattcatgggccggggtcccagatagtgcacaaaaaggagaaaggaaactcagcaccaggtttatcactctgcttcctgactgtagatgcagggaaagcatggctcctgatgccatgacaaacctccctttaactataagccacaataatctctcccttgttttctttttgtaacttttcttccccaaatctgtccctctctctttgaaatttatttatcctccccccccccaagacagggtttctctgtggctttggaggctgtcctggaactagctcttgtagaccaggctggtctcaaaatcacaaaaatccacctgcctctgcctctcgattgctgggattaaaggtgtgctccaccaatgccagactcaaagttacgacttacaagtattaagtttgggtaccaactcgacaaggagaactattgtcaactttataagactgaggataaacaaacagataacctctgggcatgtcagtgagggatttatgtgggttaggttactgaatgagttggagtcctggatacccatttctctgtttcctgactgaggatacaatgtagtcagtagccccaggctcctgctgccatgccttccgagcaatgatggactgatgtgtgatgtccttctgtacgctggaatatgtttttattggttgatgaacaaagctgctttggcctatggcagggtagaatatcgataggcgggaaatacacacagagatagaggaagaaagaagacggagttgagggaagatgcagctggcgaggaagcaagacatgtaaaaagtgaggtaatgccatgaccacatggcaatacatagattagtagaaatggcttaactgaaatgtaagagccattgcccaaacaattataactaatattaagactctgagtgattatttgggggttgctggcaggacagtaacttctgcttataatggacttcctataaatcaaaataaatactaacatttgtttctttttttgaggtagggtttctctatacagtcttggaactcactctatagatcaggctggtctcaaacacacagatacctacgtgactctgcctcctgaaactattctcattatttatttattcgtttgtttattactttttttgattttttgagacagggcttctctgtgtagctttggaggctgtcctgggacttgctctgtaggccaggctggcctcgaactcagagatccgcctgcctctgcctccacctcccaagtgctaggattaaaggtgtgcgccaccactcttactttctaaagttatatctgtcatagcaacaaataactaatgaacacaaaagaatcatcttgttttcaaacgcaaatccagcaatgcttttaggaatctcagtgatattgatgaaaaaatatgaagaggtatgtacaggagtatttattataatattttgaatgatatcaaaaagactagactaacttaaggaccagcaacaagaaactagttcaattttatactgtcacatgaagactgtcagctgcgaaatgaaaagcatcgttatatattgcttcagaatgaactctagaacataaacaggtccccttatctgtgattttactgctgaaatttgttataattagtccactttagtctaaaaaatgcttttaagaaagactacatcaagcctttaatgcctacatttgtgaggcagaggcagagagcccggcaattctctgtgagttcaaagacagcctgatctacatagtgaattccaggcttgccaatagagagaccctgtctcaaaaaaaaacaaaacaaaaaagcaaaacaaaacaagactacctctgcataactttgttaccgcacagcatgatgtttttgtggttatattccattgcaggtatttacatgtgggggcctgaatgagtcatgttatttacagtctcaggcacttgagcttcagacctcacctcctcccagtgtggttcaggatgggtgctcacagagtccagttcccaccatcacgcctactacttgccgccaggcttccccaccttaatggactcttacttggaaacataagctgagtaaactcttccatgttgccttgaacacggtgttttatcttatcaacagaaaagtaattaacacatcatgtaaacaaaacctatagtacaagccaggtgtggtggcataggcttcaacatggacttcagcactcaggaggcaggggcagatggatctgagttccaggccagactggcttacagagtgagttccagagatacccagagaaaccctgtctaaaaccaaacaaattatctattaagaagactcaggaaggggggactgagagatggctcacaggttaagagcactgactgctcttccagaggttctgagttcaattcccagtaaccacatggtggctcacaaccatctgtaatgagatctggtgctctcttctggtgtgcagatgtacatggaagcagaatgttgtatacataataaataaataaataaaatctaaaaaaaaaaaaaaaaaaggaagagccaggataattcaggtaggcaactaaaatttaccaaacaaaagcctcagcagctaagaagtgtccccttctctgtgaagccctggctgtccttgaactcagagattcgcctgcctcttgatggggaatattcttctatgtatttgtttatttatcttattggttgatgaataaaacactgctggccaatagggtagcaagacaggtgggacttggtatgaggatgattctgggaagtgtaggcagagaagaatcagcatcccaggaagtgacatagttgggcagaaactgccactagctaaccatagaggtctggaggtctgtgcagataggcaggtagtgacgtagctgggcacaatcagaatataagcagggacaaacagaaaatcaatttcttctctgcggagatgtaaaaggcaaaggagctgcaggttcagcattcccggtaagccaagaccacatggaaatacttaaattgatagaaacgagttaaaaattaagtcagagctagctaataagaaaccatagccaacagccaacagtttcataattaatacagtgtctgtatgcttctttgggggcagagaagggcagcgggacctcagcggggtgttacagcctctgcctctatagcgctggaattaaaggtgtgcctcacagctgcccagaactaacagtttttggtttttcaagacagggtttctcttgtgtaacagtcctggctgttctggaactcactctgtagaccaggctggcctcaagtgctgggattaaaggtgtgtgccaccaccgtccagctgttaagtttcttaacctttacttttttttaaagttaagagttttagtttgtattggtttgctagcttagggtatgagtggactttgaaggggtagggtctagtggaaggcgtgtgggagcaggaatgtacttgaagggacactgggcaccagctccttgccccacttctctctcagtgacatatgttaagccactttgctattcgtgtagttctcaccaagacatactgtgcacaggccccaaccaatggcaatccactgtgaatgaaaagtatgttttttctcatgtatttgtcacagttataaagtgctaacatcatcaagtgagtaagaggcaattatctgtagtcattctacccacaaaagaatgaacagaatcaccacttaaaactttgctgactctaaaactgccacattggatgaagaaatacaattttatgcacatgaagaatcggggtggggggaacaccaaggttgaatagtgacatagaaagtacaccaggaaagtgttatctgcagaacttgtaggatgaaattgaatttacctctgataaagctgaagaaaagtgattgcagtttttgtgcatcaaatgataggcattgcctttatactcttttcccagttcttctacaattttttctatatcatcttctaaaaagtccgtactccctaaaacaacagcttctcttaaagaacaaaaaacaaaataaacaaagcagtttcgatcaggtcatttataataagcattattaaatacttgcttattttcaggtatatcgcaataaataagtcaggtctaacattcagactaaaggtaaatgagatacttagaaatttcaatgatttatagtttctattttgctttatgaaacatattcattaacagagaatcagatttaagctaaaaatacccctgctaaatacacacagcaaagagccatgaaacctgactaaattttaaaatatattatccaaaatatcaaataaaaacacttcaatatatttcctggaaaatgtaacagatattactcaacaaaaggcagaattttagatataagctagttgtaaaagacagttaaaaattattagaaaatcattttaccaggcataaatggaaatttaggggcatcagagctgagttaggagagctatgtactcagaagtgttgtaaccctgttctgaatttatctgttctattctcggcacattaactattacagacccagaggtttctttggagcttcttgaaatgaagactctaaatatcatgttagatgtaacaagtaaggaataaaaagactgattaacacagggaagggtccagagacaccgcttggtttagagctactgctgcattgatgttatcagcaacactttccagcttaatcagttattctgaatttacaagtgtttctttgagaaaacgaagagatttttatattaggtcacagtaaaaaaaattccactctgtccactttccctctgagtttcctgaggcagaatgtaagataagcaaagacaactatatttgagaagcagacagaaagcaacttagagacaccctgaacaaaaagcaaagacaggttatttcacacattatttgatttcccatccttacgttaacaactcaattcaatttaaattaaaaataaagtgtcagccactaagccaaaatttaaaactattttaactttttagatttttaatctacaggatgaattctttatgcctgaaaacaagctccgacaccttaaacagtgcagaagaaattaccctccctacttacttaaatttaaatgtttctcctagttcagaagcatttcctggggaaatttcaaatattccagaaaaaggataaggatggcctccataagcaaattctgaaaagataaaagtcaaaatttttagtatgtgttgcatgaaatgtgttcagaatgctgaagcagcttttaaaatacctttacaaggtcctgtttggggattaccagtacagaacacctgtctttaaaggctgaaatggtaagagtcacagatactccaaaactgctctgtgactgctctgtagattgctctgcacctactccagcaggagactgaccagtattcaaaagggatcagtctctgtggcaccagcataccatgaggccagcagctctggacttggttgcttttaaagcttgcacttccctggagaaactgtctaatgagaatgagttttcatgttcccccagaggagctgctttgttttagtgtgctttgccatcgtgctgcaggcatccacaccttcccgaagactcctgattgacactggattaggagtgaacacaccactgtactacgcatggggacatatgtctgtaaccttagcactcgggggaggtggatcttgagttttagactgggctatttctagtgagttccaggcaggtctgaactatatatgaactgagatcctgtctgaaacaaacatcaaacctaaaacaccgtaaaatgacaacattaaacacacagccaccctcatggtcttcagagcatctcttgtagctaggagggtactatttgtacattctcctaatacacgcatttccagctatatgttctcatctacaacaaaaatgcagacagcttcaagttaggaaagaaccacaacttctggcttcaattctggcatctcatttagatattaagtggtaaaggcttggtagatataagcaatctcaaaaaaatgcttaagtaagttagtccttaagtcctgatcacttaagatttactaaataactaggcatggtgatgcatgcctataatcttagtgctagagacgtggaggcaggaggatcactataagcttgagggaagcttggtctacattatgagttccagattagtcagggctacatctctgtctcaaaatgattaaataaatgaacatatttgttaaatatacagtcgtaagttttgaaacaaagcacaggaaagaacatggtagctgaggtttagtttttctcatttaaattttatttggatgtgtttgtatctaggtatatatgctaccatgtatgcacaggtgcctgcaggggccacaagaagacaacagattccctggagatagagacacagttaggtactaactctagtctccctatatccacacccaacagaactgaaactgagctccaaggttatcttttcattcacagattctgtagaaatttttgaaaaataatgtagatgagggtgtttaacactttaattttgaaatataaacttttttttctttttggttttttgagacagggtttctctgtgtagttttggagcctatcctggcactcgctctggagaccaggctggcctcaaactcacagagattcacctgtctctgcctcccaagtgctgggattaaaggtgtgtgccaccaatgcccggctgaaatataaacactttttaacaaagaaaggatttgattagttaccctaaactgacctgatttaactctgaagcccaagctagctttgaactcataattctccagtctctgctccccaactgctgacattagaggtgtccacttcctaagtttttctttgtctatctggtcttgaggtagggtctcattctggccttaaactcaacaatactcttatttagctttctaagaactgggatacaaccatataccactatgacctgctcctctttaagattcagtaaatcgttctatataatttatttttttaaatattgtatatatcaagattggatttggtcaaaattcattgttttggtttttttgagacagggcttctctgtgtagccctggttatcttggaacttactctgtagacaaggctggccttgaacttagagatccacctgcctctgcctcccaaatgctggaactaaagggaagtgctgccaccaccacctggtttcatacttggatctttaaatttttatttgtttatttatatgttatgtatgagtgctctgcatgtatacctgcacaccacaagagggcatcagatcctattatagatgatcgtaagccatctctccagactcagatggattctaaccttcttaggtatagtaatggaagacacaggtccttttagtttttattttttttttttgtacaagaaaccattacaatttctctgagtttccacgaacatgctttgagtcatgcttttgttcttaaattattttatgaagggcagtaaaaattgtgcaggtaatagagcactggactagcatataagaatattcgggctcaaattctagttctgttagttattagcagtgtgaatggtgacaggttagagccttaatttctttttataaaagaaaaacgccacattctcttaccttacagtgtgatcatatggttccaaagttcacagtactatggaaaccgtaacacactattcaaatttaaccaaaaaggggtaacacacttaggcaaaaggccagagaggacacccatggcttctagtcccatccactgcattaatcattgaaaatttcagctgaaactcctcaatgtttcttggggttagcaagtaaagcttaaatgacaaatctttatagccaagatttaatatgctaaattgtagctagaagcaactaaaaaaaaaaaggagggcggggcggctaggtacatagcccagaggtacagtacctgcttagtaagtctgaggccttggattcaattatcagcacctgtccacccaaacacaaaggcagcagaaacatcatactgaaatatttaagtaagtggagtttttcgtttaaattagtgaataggtatgcaggcagtttaccctgggtaaattggataatgtattctagtaggttacaaagactgcccagcttatgtaaatatatgagcttctgctaaaaggcaagcttctaattcatgcttatgtatcactctaactgagcaaaatgctaggtgttactaaaggcaagattgcttagcatattctttattgatacaggcctgcaaaatccaatgttttactgaaactctgtaaagaaattggtatttcaaatttgacactttctatcctaactaaaatgattatttttgttatgtagttaacttttcaaagtgtaaaagtttcttaaaaactcttatacatattagagaaaaacaatcatggtttaacaacttcagaaagaagggctcggttttttgagacagggtttcacttgtagcgctggttgtcctggaactcactctgtagaccaggatggcttcgaactcatagaaatctgtctgcctctgtctcctgagtactgggataaaaggtgcttgtcaccaaacctggctaagaaaatgttttagaagacaaagtaattagaataaaaagataatgaatgtaccctcttatattctaccacagacattttttcaaagcacagtataaatagatgtccaaggtttattctactttctgcaataacatatgtaagtcacttaaaagaaaagggacaaagaaaaagacctaacattatgattctgtattttctttaattggcagaatcttcagaaaacatatttataaactgtgtttacacatacctctgccatagacttcaattccagaatgaaaaactccaattccaatagatgaggtgtattcattcatccagtactaaggagagaaaaaacaatttttgaatatccattcatttacagtccaattctacaggacagacagagtgcaaacctagttcttgctgttttcccttacaatgctgaaactcagagtagcctaatctgctctcccacttccaatctggaaggccttcctgtatctagacaaatgtttcaacttaagtccagcacactatttaagggttagcacataatacataacatttaaataaagtaaaatctaaatttggatcaggttggtaacaaaaattgacataaaagtgccattagtgattaaaacagcacacatagaaggggtcatggtggcacactccttaaatcccagcacttgagaggagaggcaggtggggttcaaagccagcctggtctacagagtgagttccaggctagccagagctacacagtgagtccctatccccaaaacaaaacaaccaaacaaaagcaccacatatagatatgcatatctagctagtttcccatctatccttaactgtgtaaaggtgtgttacatttgttcgtgctgtatgtatttgtttaacaaagtaaggatgtgtgtttaattatataatgatgtgttgcatctgtttcaccttgcctgcctaaggcacctgattggtctaataaaaagctaaatggccaatactatgcaggagaggatagatagggctggcagggagagagaacaaaaagaatgagaggagaaaatgagggagaaagagagtgacatacctgggaccagaagccaggcagccgccaatcagacacaagcagtggaagaaagatacacagaaggaagaaaggtaaaaagccccaggcaaaggtagataaagagaaacaattaatttagagttaaaagagctagccagacacaagcctaagctaggtggagcattcataactaataagacgtctaggtgttggtggcgcacacctttaatcccagcagttgggaggcagaggcaggtggatctctgtgagtttgaggccagcttggtctacagagcgagtcccaggacaggctctaaagcaaccgagaaaccctgtctcgaggaacaaaacccaaaagatctctgtgtcatgatttgggagctggttggtggtcctaaacaaaaagcctgttacaatttagtatatacctgttcatgtgtacatgcatgcatgccaagatcagatgtcaacactgtctttctcagttgcttctccattttattttattcaattctattttaagacaggggtctctcactcaacctacagtgtactgactggacaagcaagctctggacatgtgcttgtctctatcttcttggcactggagtcagacagacatgactcctgggttttcccttgggtgttggggattccagttcaggtcctcatgacgtgcagcacgcgctttatcccctgagccactgtggtggctacttgagaggatggagcctcaattaagaaaatgcctcaataagatcaggctataggcaggcctgtagagcattctcttagtgactgatgtgaagggtccagactattgtgcatggtaccatccctgggctggtggtcctatattaggtaacaaagcaggctgagcaagctatgagcaagctagtagcacactgccccccccatggcctttgcatcagctcctgccaccagtgccaatccacttccccagccactattaattttgtttttgtttttgtttttttgggccagggtttctctgtgtagctttggagcctatcctggcactcactctggagaccaggctggcctcaaactcacagagatccgcctgcctctgcctcccgagtgctgggattaaaggtgtgtgccaccaacatccggcccactattaattttttgagacaagtcttgctatctaatccaggctgcccttaagaccttcccactttaacaccgagtgctgggattacaggttcatactactatatcagctctttttctaaatttagtcaagttttagctgtggctttacatcccttgctagaaaacatacattgtcacaggctactagaaaaagcataaatggacatgtcattccccccctaaattatatttagaagtaaaaatgaaacaataagaaatatttggcaacaagcaaggtatcttccagtggtggtctgaatgagaattgcccccaccccacccccacccccattggtggaactacttgagatggattaggaggcgtggctttgttagaaacagtgccctggaggtaggctttgaggtttcaaaaggctggtgggattcccagtgctctctctgcctcctacctgtagttcaagatgtgaactcttagctcctctagccagcatgcttctgaaactttaagtccaattaaatgtttgtttgtttttagtaagttagctttgccattatcacaacaaagaaaactagtatacttcccaattaagtatcgaaatcctcaatacagctgaggaggtatctgagctgtagaataccagctcatgtaccaggccctgtgtttggatcccaacactgaaaaattgatcacaacaatacaggatatagcaaaaatatcctgaaacatgtttacgtatacatataaaaagctcctatttgacaaaggtagtatttaaaaccaattattaacaatgggtaattattaaactaggtatgatggtgagtgccaataatctcagcatttgggagactgaggcagagggtggtgaatttaaaactagaatgggtgacaccttaataccctctcaaaaatgcaaaaaggaaggaaagaatgtattcatctaggggtgggcaggagacagaggtgagggcagcagggaaggtaatgaatgagaagtatgatgagacccgtgaggacaccagatgaaactcatcactttatatagtaatctcacagacagcgagagagagaaaactctaaaaagcaaagaacatctctgtccccgccctcttgtcaagacaagttttctctgtgcagccctagctggcctcaaactcagggatctgcctacctctaccttctgagtgctgagattaaaagtgtgcatcttttaagaggatagttactaaaatatattggcaaaaacctgacaaataaaaactatgcatccaaaaattctagtgtgtctaaaggttagaagtcaggaatggtaatgcatgcctctaatactagcacaaagagggctgacactagaggactgcaaagttgagaccaggctgagctacataataagtgtgatatcaagactggctataaaacaagaccttgtcttaagttcacttttctcagctaatttcttttcttttaagtaaaccaaaacatctttttttttggggggggggcggtgttgacacaggtttctctatggttttggaggctgtcctggaactagctcaggctggtctcgaattcacagagattcatgcctgcctcccgagtgctgggactgaaggcatgcaccactactaccacctggctaaaccaaaacattttggttgaatttaggcttgaacttacagaaggagaaaatcaacacccacacccacacccactcactcaaaaatttgtaactttcaattagtgagctggcttagagggtaaaggtgcttactgccgagtctaatgaccttagtgcaatccctaggacccacatggtaggaagaaaactggctcctgcaagctgtcctctgacctccacatgtgtaccaaggcacacagacacacacaaataaatgttgtagataattttgtcattaaagaattgtgtatacttaagtaatattggaaaattaaaagaacacatagggagaaaattgcaataaatataacaaagtttaatatgagattgtgaatatcctctgtaagaacaatacaactggatggccttgcccccccaacgataggcgggacacacacaggaaaacttgctaagtcatcgccacagcacccccagtgcacatgtgcaaccttccctttaaaaggtccagccttccatctttctctctctctttggctcctctcgggttggctgacaagccagctccatctccccccctttcaggtaaataaactgcacgtgggttgttcatcagttgttcctttctttatatcagcagctgcagcttaaacagaagaataacatcctctctacccaaatctactgggctgccactttgtacaaccagaagttggaaggcaagaacatgagggatacaatttaacaaataaacataatttgggaaggaggggaacatatgtgcaggtaataagggactccataaaacatttacccaaatatatttatccttacagacaaataaaagctcagaacagccaggtataattagaaaagaatcccccaaagatatgtaagtaactacagaaacaatttgtagtcaaccaacgggaactaataatctcactagtaaacaggaaaatactatattctatttttttctactatgattgtcaatacttttttttttttttttattggagacagggcttccctgtggctttggaggctgtcttggaactagctcttgtagaccaggctggtctcgaactcagagatccacctgcctctgcctcccgaatgctgggattaaaggcgtgtgccaccaacgcccagcttcctcttcaaataaaataacatttggcacccaacggtttaggctctccctgaaacctctcctgccaggggcacgggaaatttcggggatcctaaaatctgaactcataacccactttccatctcggtttttcctggtacttcctcctgcctacagtggcctgagatgcctggactctacatttcaactcgccgcttttccaactaaccatctttggaatccactcatctgtctgtttgctacaatccggtaagatatcccttgaatttcccgagggtcagggtttggaatcccgagcggtgcttttttgctttttcagttcggaccctgggtccttttcagtttcaggacagctgtggcccccttcagggccagggccctggcaactcccaggggctgacgggcatctggagaggagcttttgccagttttcccacttgcctcaaccatgggaaatgcataaggaacgcttttttttttcccctaagattttatttatttattatgtatacaaattctgcttccatgtatatctgtacaccagaagagggtaccaggtctcataatggatggttgtgagccaccatgtggttgctgggaattgaactcaggacccctggaagtgcagccagcactcttaacatctgagccatctctccagtcccataataaggaacccttttggttgcagccaacaggcaggtaaacagacaaaaaggcggtttatggttgctgccatcttggccatgtgacctgtctgtaggcacgcccactccagcagtctgtgccagcaaacctggctgcaggacttttgttttctgtcagattatttttttgtctgtgatgtattttttcactggccctgttgctcatggcttatttatggaatactgtgtctttacagggccctctgtttaagtctactctgtcccttcaaatctcctgtttgctaccatgtacggatcagagattacattctggttccccctttactcttatccagtcctacttgtctgtgtacatgtaatttaaatttaactttatacttatctaactctatatgcaacttaaactgtgctaagtctcatatttctaaactgctatgtatctttaaatgagggtaaacatttaaagtcataaaggtctaatttaactttatatttagaatataagctaatgaagggaccagctccccatttcggctgccataacagccgaacacgtgcttgccctgaccttgccttggtcactaggaggtcagatgcctgcctcatggcaaggaaccaatcagaagttagctggtggtgccatgctttacaactctgggtgtgctttacagacaagtgcacagcaatgacgcacagagcacagcaaccaccctgggagggcctatgggccataacaaccagttgaccaatcaacacagggcaagcccgccaagcctggaggcacaccaatcccgagcctgtgcgtatccctagacactccccttatgctgccctataagatctctatgcagatttttagagctgtctttcctagccatccgccatggtggatggatggaaggcccgagctaacatggggttagctcattaaacaacaataaagcctcaagcagtttgcagcaagtttctgcctccgcatggtgattggggtggcggcggtcctgggcggagatcctggaggcctgagcttccagggatcttacactaactctatacaacttaaatttaactcatgtatctaaatgatgatgaaagtttaaaatcataaaggtctatttcaaattaacaaaatatttataccattcagtctatcctgtaagccatttacaaaggaacagcttttattacaaaaggggatttttctctaactaaaggcaaacttttgactgctgagatactaaacaggcagacagccctcaaatgttcagagatctacagaacaaggcatttaaaatgttttgttaaaaagctttctataacagagataggccagctgctggccccaccccatttcctccaataagactgatgggcactaaagaaacttcacctcaagtcagtgacaacgctagtcactgcccttcacctcaactgctacaaagtactccagaccgtggacaagaggacagtggaatcgactttccccgacttggttgggccaatggtaggcaagccttcctgtagtctgtaatccacaggtcacatgctatcagcaagaaggcaggtgtcctgtagcccactactatgaatggaggaccttggtgctgtccatgcagcctgctggcaagtctctgttattctttaatcattaattcaagtaaaatcttattctcctcaagaactctgatgcttttgccagcttaaagcaaaacagatttcaggaacaggaattttagggtttatctatgtgacgataggaaagtgtaaagcatatgaaggtctgggaatgtagttacaaaggtctgaggatggaaaggtctaacacgatggataaattcaagttatgaaggtctgagaatataaggtatacaggtctgagaatggaagatctaagatggtaatgtaaggtgtatgaattaaagttatgaaggcctgaggacaaaaaggcttaagtgatgataaagtgaattgagacattaaaaagaatgaaatatgttccagatttctctctttctcatgctaccgttcatagtaagtactacaataccactcactatacaatcataactacaaggtcaagattaagatgcttttcattgccctaaaaaactgtcaattttaaaatgttaatgctttcagccaagttgcttctaacatgaatatgctgctaatgtgtctaatacttatgtttccacaaactctaaggattcttgtaagttccagggagctgaattggatcaaaacaaacaggtcagagtcactccagttactcaatctgtccctggtcccaggactcccttccctcttgttgggactcctcagggatccctccctcatcttagaatcttcccctcaagtaccaggacctacgaaaaaaagtttttctaaacttaaccttgttctctgctctgccaacatcttgccaggtctaagaggaggcaccagggagttccatacagtctggactgtgatgaaacaaccagctaccctaggacatggcagcaccccaaccttctcaggtccctcaaagatggtcaacaccccccacgtcagcaggaagcagtcttgagaatttgacactcttattccttaatctgccatgtctaacaccccatctttttttaaataataagtaaaggtaggattgaaaggttcaggcattacgctggcctgcccctgttacctggcggaatccactcaggcagaaccctggtcagcccagggttccatgggatctaagtctgcatgcaggtgcaaagaacccctttaaaagacagacccctgcccacttatgctctctctactctgctcttctgctcttctcttctcccacctacgtgcgctctctctgtatggcgaccagccatggcggtcagccattaactctgtttctcttctctcttagtctctctactctgctgggcctataataaactggttaatatgtctaatatgtctcaacctgtgtctcatcttactcctcttcttttatttctaatttaagcaaaagaataacagtatgtacttgtggattgcattacttcagtctaaacttcaagtctttatattctaaaatatgacaatcttaaaaagaagaaatatgtatcacctcaaaatttactcagttatgtggcttggtctgtttgtggggtccctgacaatgggaccaggttctatccctagtacatgagctggttttggagcctatttcctatgatgggatgccttgtacagcctcgatgcaggggggaggggcttgttcctgcctcaacttgatgtgccaggctttgctgactcccaatgggaggctttaccctttctgaagtggattggggggggggagggtggagtactgaggttggcatgtaaaacatttaaaataaaattaaaaaactctggccataattttaaaattcataatgatgacaggtggcttacataaagcagctgaagaactgctgaggcggcacaatgacacaggaatagtggatagctttctttgcaagtggtagtttctttcaaatggaagttggaccatcagactgcttttgctcaagattctagaaagccacaagttgctaggaatggattttcttttcattttaacaaaaatattcctttggacagaattaaacaacttttaattcctaacatctttttacttttttttttgaaggcttttaaagctgtgtaaggtacaacaattaatattgttgttgcttagacattggttgcagtaacaacacataacacattatatgaatcatgtgaacagcccataataggcaaatctatacagatagaaaatagaaagtaggtcacacactgcttacgactgtggagttggcggtgtgaggtgtgactgctgaagggtctgagttttccacttatggtaatgaacattttgtaacattctcaatgtagtaaagcctccactaatttgtaacacacagcacaagaatgcatgtacaaacacattttgagacaggggacttgctacacaacccaggctagctggaactcacaatctttctcactcggcatactgagtagagaagttacagatgtgctctaacagtacacttggctgagtatattgtttcataaatacaaattatagttatctgttttgactaaacaaaaactattttatatatgctgtgaatccctcagcagtaattttccaagtataataaagattttattcttttaattggcaatgccaatttcttccttgttagcaaactgagaacaaaaattcatgaggaaataagtttctgttccttttttttgagacagggtttctctgtagctttgtagcctgtcctggatctcactcgtagaccaggctggccttgaactcagagacccacctacaggcgtgcgccaccaccactgccagtaagtttctgttccttattctgagatgttacacagtaaaactttatgatgagaaaacatctcagcatgtagaacacagtaactctttagttagtgacagtcctcaaatatgatgatcccataagattataacagagccaaaaagttcctactgagtaatgacacttaaggtaatgttgtaacagtatgcttgtggtgatagataacctataacatattttatatatgtatagtacaaataattacagtacagagaacttgataataagtgttactggtttaagtattactatacgttttgctgttattttacactgttctttgcatactttagctgctgtgttatatatgggcaggacagggtcgcagcatctcatgtttacgtccccttttactatatccataggccatatgcactatgtgcattgggtctcaaccacagcaccaggtcatgatgaggtcactggaccataccacgtaggtatgtgtaagtacactctatgaagtatgtacacaacaaatttacgccgggcggtggtggtgcacgcctttattcccagcacttgggaggcagaggcaggcagatctctgtgagtttgaggccagcttggtctccagagcgagtgccaagataggctccaaagctacacagagaaacactgtctcgaaaaaccaaaccaaaccaaaccaaaccaaacccaaaaacaaatttacctgataacacaaaaataggtaactgatgtatgtcctgccttaattgatacttacctccatatagataatggatatgactatcaatgaaaacaaacaaaaatgcaaaatacagatatcctaaatttttttctagcaacactaaaggaaatacagttagttcttgaactttctattcctagccaaactaaatagattacttcttaagttacagtctgcatttctaattctaagctgccttccaaacgtgtgcttttagctaaaggaaaacaggatataaaaaagtagcatttcaacagcagcaggaaagagactgtattctagtcagcacctcttctcttcatacacaacagcagcacatttctgaaaaaactgttttcattacaaaatgagtaaacagatgctttttctttgggtgagcattttcctgaatacattcatcatagaagggtaagcccttccttggagttggtcagagagaggtgccctccaaatgttcaggcttccttgatctattattagagaacaggcctggaaggctcactctttacataaatggcaggctgcctgagaagacaggaatttaattcaaggtcagcatgccttatcaagtcctgcctctgctatgcagacagtatggatgaggccctgttttgagatttaatgggataactgtaaacaagctaggagaactgagccttttactgaataattgccattgtgaaattctcttatagttatttatcactactaattattcatgctgataacaatatccttttacaagtaaaatttgtaaaattagtagtagtgatttccagtgcttccctaacttggtgtttactccttgtcatcactttttttttttttttgtttttcttttgagccacagtcttgctatggactaacataggccttaaactccttggatgaactaggtaggtagcctctggagtgttaggattacaagtattacaagtatgtaccaccagatccagctctttaaattgttattatcatcatcattattttggttttttgagacaggatttccttgtgtggctctggctgtcctagaactcactctagacaggctggtctcaatctcagagatctgcctgcctctgcctcccaaatgatgggagaaaaggtgtgtactaccactgcctagctatttttattatttcatgtaagcattttttttttatggcatgtgtgtgggtgcatggtatatgaagagaccagaggctgtgtgttaagactggaactgtcactgaatctggaactcacaaatgtggctaggctggtacatcaatgactttcagggacctgcctgtctcagagctggggctgttacagatgtatacctagcttttatatgggtactggagatctaaagtcctcaggcttccgtggcaagcagtttcccaactgaggcacagctcttttttttctccttttcctttttaaaacagggtttctctgtgtatgcgtatgcagtcctggctggtctggaactcaagcgatccagcagactctgtctcccaagtttgtgctgggatttaaggcatgcaccaccactgcccagcttcacagcttgaaaaaaaaattatttcgctaccaccaaaacttattttacatagcatctagagcaaaatctccctacaaagctcagagagcttcttaaatttgcaatatggaaattcatgcttttgtagaacaccaagtataatgtatgtttaattccattttataaactggaaacatttttttctaagagaaaatataaatattcaaaaatgaaatcacagccaagaagaagcatctatgaaaaacaaaacaagcttctgaactagattatgactggatgttagcaagatttctgttaatttgtgttgaatatgtctttattgattttgttgtctaaatagtaacagacgccaaaagtttaaacatagcgtactcgagaaaaaaaaatggattatccaggatattctattcaaacaaagttttagaagctggcttcttattatctggggatggtcacttctattcccagagtgtggtcctaccagagttgagtggactaagaacacttgctctgagacagctgccaaaagtgggatgaagagttacatacgataccaggggccagttctgcagacaaagcctgtcacagaaagatggggctgtacaagggaggaaggaaccagaactcacagatcaactaggggcggctccatattcaccattatgcagtgctggcttcacaacatgatccccgttagtattcaggcatctgcactggcctgcccttggggtcctgacaggatatggcctccgctgcagccactaagagcactgcaggtgtacattcactttgtttcctctgcatccatactccctctctccctttttctcttctcccactcttgtccccagggaccagtctctgccctctctctcctcttccaataaatccccatgtgagtcctgtggtgtggctgactgctttttgtggagtttttaaaaattacaacactggggcaggagagatggctcagaagttaagagcacggaatgctcttccagaggtcctgagttcaattcccagcaaccacatggtggctcacaaccatctataatgagatctgatgccctcttctggcctgtaggcatacatgcaggcagaacattgtatacataataaattttaaaaaaattacaacactgccaggaattgtatgtgggggaatgacaaacattttaatttgaaacttaacaattgctagtagactcaagggcccacaatcttctagtttggagcacaggggaatttcttctactatatttgaactaatcaacttagaaaaaatgtaccaaatattatcactaacagaaacagcataaaagacactagattcagtgaagatccagctgtttggccttggtttgttagtggatttggtaacttttttggggcagggaggagcgatttctagatagggtttctctgtgtaacagtcctggaacttgatttatagacgaagctggcctcaaactgactgagatctgcctgcttctacctcctgagtgctgggatcaaaggcgtgcgccactactgcctggtggatttggtttactcaatctgtctcaaaaaagaaaagaaaaaacagttaatgtgatgttaattcaaaattctggagctttggtgtaaatattggcttagttgtttactaattcaaattggcagatgtctgagttctccaccctcaatgcccatgtgtacatgaggaagaaataagcagactccatcttagagggctgcttgaagggtcaaaggagtcaacccatgcacgcttagaagagtgggacccctggtaaacattaagtgtcagaaatagcaaacctggtttaaacctgtaataccaacactcagaagttacaagtgggggggggttaggaatgtactttctatactgaaaagtaagtatcaaatgcatatatctactgaagaaaatggaatattattttttagcacactaagaaaggctggtgcatttgtaaacaagtagatcagttcaggttatctgccaatctgtgaatgcgtaacaattttcatgattctttctgagctgaagtcaaattaccaagagtggtgactcactaaattgaagagcaaacaatgttcgcctctactttaagactcctacaagatttatttatatcctggagaagtacaaggttgagtgcaagacctcttgaagtaaggctgtattttataggctgttaatgtttgtgagggccatgagagggctagagaccaaatttcattttggcacaagatcttgacttccttatgtctagggaaatggtaagcacacagacaagggccaagatagggccctgatgtgcatttttcctcctctcataccatggagacttatttattcattcacatctagaaaactttttttaaaaaagcattccatagtattaacaaaaggaaagcaaacaatgggaaagatatgtaagaaggcaatatacataattacttagggctcaattttgcttcaatccaaaaaactggcctaaatgcttctatttattattttaaactactgtatactcaaatgaattgggttatggcctttcttctgatagagacctttcattaaacttcactttagtcagtgacttgcctcatcaatttaataaacccttatgcttccagtttgagatcagcaatgacaagtgctatttccctggtttggaacctaaaatacttaatacaaccacttaggacttggaaccaacttctgtacacaacagtgttaaacaatctgagtaagtgtaaagtatggctgttttcctccaaatctagaaaagtgtttgtgtaagatgttgggtagaatgctctacttgtccccccctatcgaaaaacagtactcagggaatagaaagtatttaatttactgagttttaaagcctcaaataaactatgaataaaacggaaactgtaggttaattaattaccacagtaaggtctcctattaactggccctggtgatcaaaacattattttacaaagttatttcataaaatcacttcattataatattatttacatagcagtcagtacttaaaaaccttgaagtttaagagtattatattcttaactataaagaattagctagccgggtgttggtggtgcacgcctttaatcccagcactcaggaggcagagacaggtagatctctgagttcgagaccaccctggtctacaagcgctagttccaggacagcctccaaggccacagagaaaccctgtctcgaaaaacaaaaacaaaaacaaaacaaacaaaaaaagaatagtattatatgcttttgaaaaacttctataaagttttttttttctgattttaagaatacatcttaaactgaaggttccttaatcattagtcaatttctggattgtgtcaatgggtcacaccagcattttaaatgaacaacatacagtcgtagtcattgaggacatgtgataaggtcctttctaaatatgtggttttagttacatgtgtgcataggggttattgtgtaaaatgtatttcttagttgattccggataaatttgagacagtgttctacaagagatttctaaattgtacctcagtttaaaatttattttacattgtttgtgttgttttgagatagggtttcaactctgtagcccagtgaattcaagtggcttcgaattcatgggtgagccagtctcttgagcacaggtatgagccaccatacctagctgtaagacttactttaaatgcatatcaacctgcaaagtttttaaaaaggggggcaattttgattcaagaaaatatgcgctaggactgttgctagacagtgagacaggaagatgaagaatttgatctttgtctataagaactcattaagaatgtaaaccaggctcagcagtggtggtgcacacctataatctcacacttgggagacagaggcaggcagacctctgtgagtttggaggctagcctgatctacaaagcaaggtcaggaccgccaaggctaaacaaagaaaccctgcctcaaaaatccaaagaaaagaacgcaaatcaattacaatttggcgttaatagaaacataaaagaacaattttttggtttttcgagacaggatttctctgtgtagctttggagcctatcctggcactcgctctgtagaccaggctggccttaatctcacagaaatgtgcctgcctctgcctccagagtgctgggaataaaggtgtgcgcccccaacacctggtgtgtaaaagaacaattttttgagaggtctttcaaaagtataccttcatttattctatgtgaaatatgtaaataagccaggtgtggtggcacaattctttaaccccagctctcaggaggcagaggcaggtgggtctctttgtttgatgccagcctggtctacagttccaggacagccagggatacccagaagaatcctgtgtagcccggttgatccggagctcgacatgtagaaacacccatctcaaaaaacaaaccaccaccaccaaaacgaaagaaaagaaaggaagaaattaataaagaggaaggaaggtaggtaaactatgttagggaaacaagcagctgcaaatacagaccacagtttttagccttctgtcacacaactctacttcctagtaactatcctcattggccccgatttttctatatgatcttgaattaggaggaggttaatttattacttttcctaaaacatgaaattatggtgcccattcaggtactaccacaaataaaaaagaaactgctatggccttcttctgcttgaatatcacacaatttgtttatcttgacattaactcagtaatggagaaacaccattctgagtactgtacttaaatcccaatttgaaaagcaggaaaagccaagaagacatctttttgcaaactagaatttcaaatgtatgtgaaccatacaactctcacacaattcagcgacaccaagacctgctagaaacaataaagatgctaggtgcttcttgatagttcttttcacattgtaggacaacaagctgtaagttctaattatggtattatataattctaatctggtattatgaacttttctcaggttaatttcctcctcctttaataaatatggcgtgtatgatgtgtaaaggtgtacatgtaaaatgtgcatgtggaggtcagagaacaggttttggaagccggttatttcttcctctgtgggttctggagactgaactaagattgtcatgtgcaccgcacactcaagtgcatagcaagcacttttacttgatgggtttctgttactgtgaagaaacatcatgaccatggcaactttaaaaacaaaccaaaacatgtatttattcctattttatgtgcactggtgtttgcctgcatgtatgtctgtatgatggtgtcaggttccctggaactgtagttatagactgtggtgatatattatttatgatttattaaagcttgcctgaggatgcaggaagcaaagtcagccacaagctatagaggtcaggaggtaatggcacacacctttaattccaggactcaggagataaagtcagatagatctgttagttcaaggccacccagggatacattagagtgcatcagtctagaagaggattatagctcacacctttattcccagcattagagggtttataaaagatagaagcaggtcttcagtagtcagtaccgggcattcattctccagccacattgagaacaggaatgttccagtgcttttagaggtaagagctctctggtagtttggctgctttgcttctctaatcttcaggttgaaccccaattatctgtctctgggtcttttcttttttgtgcttgacagttgtaaactgccatgtcggtgcttggaattgaacccaggacctctggaagagcagctagtgctcttaaccactgagccatctctccagccccagcagtaactttttttttaaaagatgtatttattatttattgtatacaatgttttgtctgcatgtatgcctactccccagaagagggcacaagacctcattacagatggttgtgagccacaatgtggctgctgggaatcgaactcaggacctctggaagagcagttggtgctcttaacctctgaggccccgccccgcagcagcaacttttataatggacaagagttaattggtgctgacttacagtttcagagagttcattatcatcgtggtgggaagcatggtggcgtgcaggcagacatggtgctggacaggtagctgagagttctacatctgatcagcaggcagtaggaagtaaacatcacactagatctggcttgagcatttagaccccaaagcccacccactagttagtgatgaacttcttccaaaaaaagccacacctagtccaacaaggccacacatcctaatagtgccactccttatgagtctacgggggactctattctttcaaaccaccacactcaactattttattcacagaacaatttgctaactctgtctctttttttaaacaacttccataacatttgagagcattataaatgcccgactaaccctacttttgcacatgtatttagcactttaaagctagtgtccaacaacaacaaaaaaataatacttttagtacttcaatttagttagcattgttctttctctgtaagtgtagtttttctttaaataaagtgaagaatgttaaactgcattttaaattagcttttttcccaagtagcattggtgagtgaacatagtgctttatcactgaactatagctaaactgtagttacgaagtaactgctgaagcaggtaaatgacagctcacttggcttacatagtcctgcaaacgataacactactaaaaacagctagcattttctagtgcttattgggtgctagctatcattctaagcaaattttaattgattcatgatccttgcaataactccatcatgtggacactgctgtgattctcattttagagaggaacacagccacagaagttaagttgacttccccaaggccacactaccataaaaccgtaaggatataaaccatgctccctgattctaggcttacaaagatctgtattatactacccctgataacaaattccaggtagcaaacttgactaaggagatcaaatacagccacctgtcgctccctcctcagttctgcctcttagaccaaatcaataaagatggttgaggactttcagtttctcatcggacagattgggaagactcataaaaacaacagatagctgagacagtagaatggtagcaccattgcctgtctccatcagcatgcctgctttactgttctgcaagcttcaggagaaagcctaatggcccccactctctctctctcttttttaaatactgtctcacagtggttggctggcctgtaagtcacatagatccacctgcctctgcctcatgagtgcacaccataccttcctccaacaaacctttataaggaagaaaaagatcagctaagacctggcctctaccctcaagttcactgcctgtggtactatgtatgcaattggcccccaaaagctcaaaggcaatggcactattaggagatgtggccttgttggaggaagtgtgtcactttggggtggctttgaggtcttatatatgctcaagtcacacacagtatctcagaccacttcctgtcacccatgtagaaccctcagctacccctccagcaccatgtctgcctgcatgccgccaggtcctactaagatgataatggactgaatctcagaactgcaacccacccaattaaatgtcttcctttataagagttgtcatggtcatggtgtctcttcacagcaacagaacccctaactaatacagaagtaggtaccaggactttagttggaaggaatatggaccttgggcctgtggattaggaaagcagtgaaatgcttgaagtaaaaggcagaggtgctgaatgtgatttaagtgtgggggccagatcaggaggtttcagaggagaatgttagtatgtggcctagaggcaggtcttgtgttattttggtgaaggatgtggctgctttttgtccttgtacaaaaagtcggcttgaggctaaagtgaagagttttggactaattccatcggcagaggaaatctcaaaacagcctagtatcgactccgtcatgtggtttttagtgggaactctaatgaagatttataatcaaagggattaagctgagcagggtaaattacctaatttaaattttgaggagaaaaagagtaccagaaaggggaatagagataaattctgtgttcaaggagataaacaaattaagacctcggggcaagatcccacccagccaagtttccaacttctgaaaaggaactaaaggaaagctcagagataggtgtggtggggtccatctctaatcctagcactcaatgaagaggctggcacatctccgagtttgaggccagcctggttggtctacagagcaagttcaaggccagccgaggttaggcagtgaaggtcgccattgaaaacagaaagttgatgaagatgtaattaaatgagggggccatgttccagccccagaaaacagcagaagttggtatctctggtcaattggttctagagtttgggatagaagaaaaggaccattgcctttgcctcccaatctaaggaaagccattgaggccagccatgtttcaggagtgtccctgaatggaagcctagagaggtcattgtgggaagctgtgaaggtgaagcctggattgccttggagaacccaatatgttgcagatgccagagccgtgggatacctgcctaggaaggctgctaacagggtgcagaaccagcccaagaggaaaaaaaaaaaagaaagaaaaagaaaaaggaagtatgtctcactcaacaaagctgaaaggaattggagatttaaggagtatttgacatcagacatagggatgcagaattgagtttgcccagctggtttttggtcttattttggtccagtatttcctcactatggtcccttccctacttttttggaacagtaacatatatcctgtgccattgtatcttggcagtgtgtgatctgtttttgattttaattttataggggattacaatcaagattttgtgaatctcagcaaagactttaaactttaaaacattgttcagactgtgattgactacggagacttttgaagttagactaaatgcattttgcattatgatactgttataagcttatgggggtcagggagtgcaatgtgtggtttgtttgtaattggcttccctaaactgatagggaatggcactattaggcggtgtggccttgttggagtaggtgtgggctttgagctcttatatatgcttaaatatccttatatatgcttatatatcctgccacctgcacaaggtgcaaacctctcagccacctctccagtaccatgtctgcctgcaccaccaacatgtccctccatggtataatggaccgagcctcggaactgtaagccactcaattaaatgttttcctttataagagttgtcatggtcatggtgcctcttcacagcaatagaaaccctatctaatacactgccctgttgtgagaagcctgaaatctatgctactgcattactgtttagttcccacagaaaatataataaacaggtcagttctcattattatcagccttagcactacaaagacagcaggaaaacaatagtgaattgaaagccaggctaggatacacagcaagaccctacctagaaaaggagaaacactttataaataaaaatgaaagtaatgaagttttggagaagctgatttgaaaagaccaatccccaggactagagagacgactctgaagttaaagcatacacaactctttcagaggaccacatttcagttcccaacaacaacactgggtagttcacaaccacctgtaactccagctccaggggatctgatgccctcatttaacctccattgataactgtgtgcacatggcacacattcacacagacacacacaattaaaaaataacagaaacagggctggagagatggttcagcagttaagagcacagattgctcttctagaggtcctgaattcaattcccagcaaccacatggtggctcacaaccattcgttatgagatctggtgccctcttctgctgtgcagatatacatggaagcagaatgttgtatacaaataaataattaaaatcttaaaaaaaataacaaaaacaaatctttttaaaaaaggacaaattcccaccttgagatcatggtacaatgcagtggatgtttaacaaatgtcatggtaaattcctctgagtttaaatggctctgcactggaaaacattttagcatatatgcttgttaattggaatgaggcagcagagtgggaaaagtgatataacaggaaggagattggaaactattctgaaggaaatgaggagctcacattggcaggctaggaaagaagtggctctaaagccacacggtcaaatttgagcacagcacgggcagcctgtcactccatgcaacaggaggaaagaaggtagtgacaggtcagcggtggtggacagaggacacacttccagtgtttaaaattcaccctcaagtggcataatcggtagggtcatcttggaaagtagctcagaataaggagtagtaaacaaggcttgaaatactgtagcttccttggagactggaaaagtcgattgaccagaggaaaaaggtagcactgccagatagcatttaaagtctgtcttgggatatgtggtcacgatttctaagtaagtcctgtcagagtggtcatgtgtttctctctaaccacagtcagttgctgagccgtggagtatatagaaatgtttgaattggagcagctagaagtgtggcagagtgactaatggaagactggaatctaaccccagacatgattatgtgaagggaccagcttccctttcggcagccataacagccgaacacgtgcttgccataaccttgccttggtcacttagaggtcagatgactgccttgtgacaaggaaccaatcaaaagttagtcagtcactagaaagtcagatgcctgcctcatggcaaggaaccaatcagaagttagctggtggcgctatgctttacgaccctgggtgtgctttacggacaagcgcacagcaatgacgcacaaagcatagcaaccaccctgggagggcctatgggccataacaaccagttgaccaatcaacacaggacaagccctccaaacctggaggcgcaccaatagtgagcctgtgcgtacccctagacctccccttatgctgccctataagatctcttgggaggccctaggagctgtcttttgctagccatccgccatggcgggtgggtgaaagacccgagctaacatggggttagctcgttaaattacaataaagccttgtgcagtttgcagcaagctcttgaatccgcctggtgattggggtgaccgcagtcgtggcctgggaccctggatacctgagttttcggggggtctaacatatgaatgattattgtaaggaactagctcatgagactgtggagaccagcaagtccaagacctagggcaacaacatgaacggctaccatggcccagtcaggtggataaaactaacctttacagaaaaagtttaggacatatgctatttttttattttattattattgttattggttactgtacatccacgagttatagagaacactgtggaaattgaagttcagagaggaagtgtgagagtagaacagttctttccatttttcaaggccttgcatatggtggacagatgccctaagccactggttctcaacctgtgggtcatgacccctttggggtcgcatatcagatatcctgtatattatatagttatattacgatttataacagtagcaaaattacaattatgaggtagcaatgaaaataattttatggctgggggggtcaccccatgaggagctgtactaaagggccacagcattaggaaaatgagaaccactgctaaggttacccctagccttccagggagaaaacatgctggatgagagtatagtttaagtgttaacagtgcttagttacatctgtgctacttacaatctgggcaggtttttcttttttctctttccttcccctttctttgatttcctttgttattcgctttaacttagataccacgtggcttcctttctccttataatagccggtaaacaaaatcccttaaaaattagctcttttaataagaaaaaatcaatgtcctatatccattatctccctcctcaaatcactaaatgttatttcactaaagtttcattttttacaaactttttcagctagcttatgggccaagttaagacggggaaatatggattattttataaatggtttgaaacaaatggtaccctacttaagaacaaacatacagattatttctaaaattttatgtgaggatgttctattttcatttctgtcgctgtgacaaacatgttgacacgaagcccctcggtcaagggtttatctggctcttcactggagggaagtcaaggcagggactcaagtgcacctacagtcaagagcacagagaaacaaacggataatttgcttgccctcatctagctttaccttatatagctaaggagcaccagaatagggaatggtgctactactactgctatcttccaaattcaattgacaaacaatataatccccaaaggcatgtccacaagacaacctgatctagaaaatgaattctagttgaggctctcttctcaggtgactccaggttatggcaagccaaacatttttaattaaaaaattaagttaaaataaaaaattaaagctgagtgtggtggcactcaggaaatgtaagccaaataaactctttcttaccctaagttgcttttggtcagagtattgtcttacagcaacaggaaagtagctaatacaaatgccaagagaagtgcaaacagaggcccagtgaccctactgagatttgagttagaagtcatataagcattgcagcctggtaaagaatctggctgcacactgccccgtcctaaaaacataactgatggtgattcaaaagtagttggcagccaggcattggtggcgcacgcctttaatcccagcacttgagaggcagaggcaggtggatctctgtgagttcgaggccagtctgatctacagagcaagttccaagacaggcttcaaagctacagagaaacctgttttgaaaaccacaaaaaagtaattgaccaatttgtttggcagggaaatttcaggtcagcataatatccaagcactggcttagttattactactcactcctcttagatgtacagtgagagaggagagtaggaaaatatgagaaaggtaccatctggcaaggaaaggactgtgaatttaaagatgcagaaaaggggtcagggaaatggctaaatgtgcttgcctcatgagcctggaaattggagtttggtcccatgtaaagataaaaggagaggtctgggcgttggtggcccacgcctttaatcccagcacttgggagacagaggcagacggatctctgtgagtttgaggccagcctggtctccagggcgagtgccaggataggctccaaagctacacagagaaaccctgtctcgaaaaacaaaacaacaaaaaaacaaagataaaaggagagaactgactccacaaagttgtcctctgacctccatgtgtaccatgacatgaccctaggacagcccccttccccatcattcaacatgcacataataaaaataaagatgtagaaaaggcacgtatgaagacagtagtttcaactgttagagactaatgcctttaaagagaaatcttgtactctctaatgacataacaggaaaggtatccctggttataataataataataataataatagtaataatgaaaacctctgcctactgaagactattgtgaagaatgcaaattcaatagaagagatcctgaactgagaatgggggaagaggttcgctgataaaaatcaagaaaataactgcctaggaaagtgtgttctcagactgaacggccaaggtacatggggaagccacagctgtggtaggaggggaccggactacatctgaaactggcagcagaacttggcatcattattcaaatagtattcaaatgttttgcaggcatgtaaaaataagaaagcagctactgaggcctggcaattattgtctggcagggttggagtctccgaaaggtggtcctgagaggtcacagtataaaagctgtgaaggtggagccagttaaaagagagatcccaggactattaataggatgcctaccaaaaaaagctacaggtactgagtatagctgccccaggagagaggtcacataagctgcaggcagaactggagggaaagactactcaaggctgttttatctctgttgtgataaaacaccatgaccaagacaacttgtagaagaaagtgtttattctgggtttacggttccagggataagactgatcacagtgggaacatggcagcagcaggcagacgcggcgactggagctgctgagagctcatacctcgaaacttaagctggaaacagagaaggcaaactggaaatgacatgtggcttttgtaattttaaagcctgccccagtgacatacttcctccagcaagaccactttctaatcctacccaaacaatgccacaaactggggaccaaatattcaaatgcctaagattatgaaggggcatctatcactgaaaccaccacattccactccctgagcccctataggctcatggccgtatcataatgcaaaagatatttagtccaacttcaaaagtctccatagtcttttaatctcaacactgcttaaaagttcagtctcttctcagactccaggcaatctcttaattgtaaaaccaaaaagcaaattacatacttccagaatacaattcacagaatatacactactattccaaacgggagaaatcatgacacagtgagaaatactgagccaattgaaacccagcaggaccaactccaaaccctgtagctccatgcctgatacaaagggcttagatcactctgcccttccagatttgctgcctgtaatgatattttctctctcttgggtggtccactccctgtatatagctctaagaaatgttcatggctctggcagctccaaaatcttgggatctccaacaaaacacaacttcacttccacatctttgaacaatggtctctatgtaaaaacacccttgccatactgcctggcctcactgactccagtgtcttttcacttacccttcatgactctaaagacagtaccacatggatgacactgacaagtgcggcataggtttgggatagacactttgtcccttaaaatgtagaagcttttatcctttctagaagcagaaaattctctggcattttcctttcacaagttggtacccctttctttatttcagtgcagatcagacattaatctcgtatctctttcatcacaagctgaaacattaagtctccttggtgcttttttccccctcatcaaaaagtatgttctcctctgccaaagaaattatttcattacttttattttcatttttgtttgttgttgttgttgttgctgtttttgtaggcagggtttctctgtttaatacccctagctgtcctggaattagctctgtggaccaggctggccttgaactcacagagatccacctgcctttgcctccaaatgctgggatcaactggctagtccatttctttaaatttaacctcaggtaaattcttaggacatgagcagaaagcacacacacacaatacatacacaccctccctccctccccaaatagcacaggaatggtttcttagcacagctgttaacattgttcccttgtgaaatttcttgagctagacctccagtctgcataactctctgcactaccttccaggctcctcctaggatgacctggtaagccttgcttacagcatcctacagcttacctagtacaatgtcccaacatcttccatattctaccagacccaacatggtcaggttattcatagcactgcccatccccaataccaaattctgtattagatacttttctattgctatgatagactactaggaccaaggcaacttacagaaagaagggtttatttgggcttatggttcaggagagctaagagtctatcacaggggtgttgggggtagtggagcttggaggcaggcaggcaggcaggcaggcaggcaggcaggcaggcaggcagagctgagagttccaggccagcctggtctacacagtaagctccaggacaatcattgctacatagtaagagactgtcttactcacccctcacccctgccaaaagccaaggacaataacatttgtttttttctaaatatttatttatttttatgtgcactggtgttttgcctgcatgtatgtgtgtgtgtgtgaaggtgggaattgaacctgggtccttcagaagagcacccagtgctctttactgctaagccatttctccagcccccaaaatgataatatctgctcaggacaggcagaaacaggtggatccctggggctcactatccagtcaatttagccaaccgggtgagttctaggctagtcagaaacccatttttttaaaaaaaaaggtggccagcaaccaaggacacctgaggttgtctgactgccacatatgcatgtgtgtggacacacaattcaaatgtgtgacagacaccctgcttaagttcaaaactagctagctacctacaactcgcctacaaaagagagaaacccagctctccacttcttcaggttcagcataggtacatgtgaggcattctgaacaatgtctgcaggaagaaagagagggtggctctgcctaagcttttttcttctgttaaagtagggggcaggtggactcctccccgatcccactacatctcacttccacaattctcttatacgaggacactgaatttagtgctctggcagtaactttgcaactctgaggacacagagacaaacgccagcaagctgagcacagaagagtaggaggttgcaaaatcttaatgacatgactgagctgctgaactatctcgggagcttttgaatctcagggtttaagatattactttcccatataagctgatgattgtcaagttgttactttcaaccaaaactaagagctggaccaggccaagccacggactgaaggatttataatgagggatttaggtttacttccaagtttttgatctgaggtactgagtaaagagtgttggctatcaaaagtggcagtggtgggatttgggggtacatagagggaacagtaagcataggagaggcatagaaagaaggggcaaaatctgctgctagacatgtggattcacagactgtatggactggttaggtgaagagtatacttcgtatataatacatgagtgtacatggaagtcatttagaaagtctgaattaagtctacagatgtatgaaagaaaactcagatcttatcatactttatactctcttggaggagtctgagtctgagaattaggctaaaacaacacagttcagacaagtgttctaggttgtttctttgccactttttgttgctgtttttgtttgtttttcaagacagggtctctgtgtagccctggctgtcctggaactcactctagaccaggctggtcttgaattcagagatccacctgctgttgcctcctgagtgctgggattaaaggcgtgcaccaccaccacccagcttctttcctatcttttaaagactctgaaaatacataggcactttttaaaaagaaagaaacttgtttctaggatgaattgataaacataaacacttgcatgttttaatttttaagaacttcattagtagctaggatagcttaaagtacacaaattctggatctatgaaaaataaacactgtgttaaagcaactatatcaaagacttcttccagtaattgaacgatacttgaatttcctgactttttatacatacaagtaaattaagaatatatgaataatctttcccaagtttcagagaatgactactaccatattttatcggtagtagggttgctccaaagtatatagactataatcacaaaaaaaaaggagagacagaaagtaagtaatagtttagcataatcttttgaggactagattagtcctccacaaaaaggaaggtaacacagacaaccctgctcattatttacacacatgtggtaggtgtagaagaggaggaatgatctatagccatccaatctagtgaacagaaaaaatacagtcatagttgaagcagatgacagggaaaaccaatggttgattttggaacagctgatgtaccaggcttataaacaaaagcaattatcatcaaaggcacctagaaagaacagaaattataaccaaagttgaaaaaaatttaccctgggcatcaagcaaaatatatcactaaggaaaactgatttgagaaaaatgggtataacaggtaaaaatgtataccttaatccacttggctttgtcttaaagaatgtgacccctccccctccaaggttaagagtcttcacaatccttcactcactcaaagttgtgatagagatttcagtttttttttttttcatgcatctatcctccagtaaaactgcaccagttcaaaactcctagagatcagcctgtgctctctttgtatcctttttccatgctgactgatctctgcccttgaagaccctgccaacttctagttcactcccttttttctttcagcatttcctcatcatacaaccacaaaatagtcaactttgggtcctcttctgctcttattaaaataatgctattctgctctaaattgtaactcttctgatatcctccttatgatatcctaaattccttaaagcagagaagtaataaagcctatctgtggttctacagggtcaaaattaaataagtaatggtaagtttttgaataagtgatataagtgttcatagaccaaaagctctcaaaagaacatacaagggcaagtttcttaaacatttttattcaaatgtttctcttcctcttgatgaaataacacaatatgtaagaaataattaagggaatcattccacagagacaatactgaatcaagactgtcatctagaaattctagatcctgcttttgatcacctgggaaggtcacttaactcttttttctgtctgctttctctgtaactatgtactaaagtgacaggaggaataaattcttttttaattacttcatattttaaaatcatttaaaacactcttcctctaaaaaaatcactggtttgaatatcatccctagtccttaccactttgagattagtaatgactttccctgattcacacaacacacactacacatcatgtaatacattctcaatttgatctaaaaagcaaaactctgctttacagatttctttgggaatctgaaaccatgaccaccagtcactgcataatcctaatttattaaaaatatagatatctcaatatatattctctagagtaaaacatatccagagggatagtttataatagtcttcatcaaaaaaaaaaaaaaaattcaaagtctgatgggcaggaagcactaaaataataaaagggcaatattaaatctgaagaaagaattctcaaggaacagaacacaaagtttaaatccagagaataatttctaaccaggaatgtcatacgatcttccagaatctattgttattcaactttttctatcatgattcacttttcctggcctgttaacccacctcctttcatctccagacttacattggaacctactggaagccccacttctagttacaggcagaccatataccctgtcaacgataacgcctagatatggcacgaggaatccctttatatcaatagttccctgttcattaaaaagaaaaacaacttataaacaatataaagaagagctaagagctgtaaataaaaaccaagactccccactgttgaatttcttctaagtagccttaagccaacagaaataatgacggagaatttttctcagtgcacatacaagaaattttcaggcttctgttaaaaaaaaaaaaaaagtaaccaaaggcaagagaacaaacccaaatttgtatctcaccgtggcgatcatatactctacacagtgcttctagggctaggtattgcaactgcaaccacacaggagccagtctctgaaccctagcctgtgtgttcgcagttcttcaaagttagatgacataataaacaaggcttcccttccctctctagtggtcacgtcatccacctgttgcaacacctggaaagtggtcttcggagtctaggaaaagagcacctccctgatctctaaagaattcaaaggggctattttctagataaattttagcttcattcattttaatgaggctgccttggagacgagggtgtgttggctcctgttcacctttggggagactctagcatccgcatcgcagctgcgacttcctagactcgagggccttgggagttgttgaagacttgagcatttggagacggcgaggatcaggacagaggggagccggccgggcagctcgggggccaggtggtggcggggaggtcgcacggcgacgggaacctcggagaggacgccgctcgtccgcccggggtcgggcccacggtcaggggagctgagggctgggaggaggctcgaaccccagccctccctggggctcgccgggcatctccaggaggcgcgccggccagtgtggggattagaaggcagcgcggcgtcccctcccccctccccccaccccgagcgctacgctggaggcggggacgcgaggcaggaagccgcgggccggggtcccagccggtccgcgagggtcgccaggggcagcactcaccatgtcgtacacgttgagcaccactaactggttagcccccatcctcctccccgcggccgccgcctcgtcctccagccgctccgtctccgcggggcggaggccgctgccacccccgcgggagctccaggcagggctcgagccgggcactaagcgtccagcccggcccgccgcagccggggcggaagcatccggcagccggggacgctcccgggagccgccgacagaagcctgtgtgaggaccgggccagaccggtggagagcccgctccggctcaggcgcctcccctcggccgcagacacgtgggggagggcggagcctgggcgaggggcgggctccgggcacccaggaggcggggcccgcccggcgccagggttgagcccgcctgcgcgctgactctcaggcgccgcacctcgagacctaagatggcggcgagccgggcgcctcttcaccccgaaggttcgaggtcgcagaaagactacagttcccagaatgcagcgcggaaggccccgtttcctattgggcgtacaggcagcctgactacgactcccagcatgctccaggattcgcccctcgcccccacacccgctctgcctcacgtctccctgggagactacaactcccagcgtgccgttctgtggatctgtccgcggaaccttgactgttcgtccttggcgagcggagcagtgttctatctttcagcgctgtttccgatgctggtagcgtgagacctgaatccaacggaatgtgaagaactgatgactaagttttccaaagcccttctttttttaaaaattttttttgcaagtgtaggaatgaggaaatgaaggaaggttactgttgtaaggtagggcgtaagaagcacccagttttcctcaatatggaattcacatttcgtgtgagtatcctgctcacgtgggaagagtgtagcaacgcatagattagctcagtcctaggacacagaaagcgtttgtgcacccattcaacaaatactatattctgtgttctgccatattccgtgcaatgaggtagactgaggaatgctggatcccgagtcttcagtttatgattgagattggatatctattttagatttgtgtgtgtgtgtgtgtgtgtgtgtgtgtgtgtgtgtgtgagagagagagagagagagagagagagagagagagagagagagagagagagagagagagagagagagagaggagagagatgggtgtgtgtgcaggtgcccaaggaagccataagaggattggcttttgatgccctctggaactgaagttgaaggcagttctaacttgcttcatccggttgctggaaaccagacacaggtcctctggaagagcagcaagggcacttagtgtgtgatccatctctccagcccccgaggatggattttaaatgaagacttggtagggtttgggccaaagagtggagtgtgtgtgtccataagtcttttagaaagattgcttgagtttctgtgtggaattttaaagaggtaaaggaaatgaaaacatgaaggttaacatgacagactgtaaaaatagcgtctcaaattatatgtaacctttgatgtgtcgctctactgactctaacaagccctgacttgctgtggtcagtgagacattaacaaatataatgcaagagagttgaaaaagcactttggacttgcttggcttcttcccgatcctgagagtctagcattatctaaacaagtttggacattgagtttgttgcaggggttggggatggggtggtttcaagaataggtttcagatttttgacagacatttgaataggtaatatgctatttaataatatatgaaactttagagggagaagcaggttgggaagagggtaatcgagttattgttaggtcatgttatattttaagtgtcttctgcacaagcttaagaaagtgggtaggcatttccataaatgaaatggagtcataaccattaaactgactaaaatcaacatttaagtagaatttaaagcctagagactggttgaatagtctagtattctacttaacatttctgttgctgtgataacagacactctggccaaaagcatcttaggagaagaaagagtttatgggtcacagtccatcactgaagtaaaccaggataggacaagaaattaaagcagaaaccttggaggaacactgttttctggctcattcacaggcttttgcttggctagcttttctatacagctcaagcccacctgcccaggaaatggtaccacacaaagtgggctggaccagcatgccaattaaggcagtcaagataatacccacaggccaatctggtcaaggtaacactttaattaggactcctttctcttatgactctaagcaatgtcgagttgaaagttgaagcactaggaagcatagaaaaaggtgcagatggaaaggaatgttaaatggggagggagatgggaggacaggagaaaggagggaatatggagagggacaactaacattataattgccttttgaaaaacctatggaaacttacgattgtaaaagcttcctaaaatatatacatatatgaaaggagtttaaatggagtcaccatataatgggacagataatgccccaactaggtatcttaagccaccaagtaaaacctccaatgcccaaaatgggttaagtcttgttgagttgttggacaacagagtcctatagacaccttcccccaacatcacagtattgctaaagctattggttactttccataacctgacagtaaggccttattgctaaagataccatttatgtcatcaagcatggagaaattgatctgttgcccaactagaagcttcactcctactgactagtgttcatggtagtggatggaaggtttttttcataataccagaggaaaagatactcaccaatattacccagctacaaacccacttgctacaacagcaacttgcctgcaaaatatatgatgtaatagtggcacaaatgttacaggagtatccaacaaccccccttctctcggtaaattatgtttaaagtccacttagtgaactggaattcaaacatgaaactactaaagtggctaagaacctacaactagatagttcatggacccaggaaatacctactactattattttgcaaaggaaacatagcaataaaatgactcctaataacctactgctagatcccaaatcagtggttcactcaaccctcatcagagaagcttcttgcagtagatgggaaatgaactgactgggtttgtgtgtcaatttgacagtagctaggaactaaagaggaaggagcctcagttgaggaaatgcctccatgagatccagctgtaaggcattttcccaattagtgaataaagggggaagtcccaatgtatggttggtagtgccatccccagactgttggtcctgggttctgtaagaaagtaggtagagcaagccaggggaaagcaagccaggaagcagctccagtaaccctccatggcctctgcatcagttcctgcctccaggtttcacccgtttgagttcctgttctgacttcctctaatgatgaactatgatctgaaataaccaaataacacccccccaacacatacacaaacatgattcttggtcatggtgtttcattgcagcaatagaaaccccaagacaggaattgttccagagatccataaatgagcaatgtgcagagagtgggagattttggagcactcagccctaaatgaaatatcatcctcaaactcaaagaactgtgcagaagaggaggcagaagggtttaaaagccttaacttttggtgcttaactccaaggaaacagtatcatccagatatatatgaactcagacaccatgatagcacactgcaagacctgtagctgttcaaactaggtataatcccagtatggagaagagaaggcaggcacaaagtcccacccctagccaagaagatatttgtaacagatacctgctgggaaagggaaaagccgttttctccaatgaagagtcagtaggtatgttaaccacactccaggcaggccctatatccccgagtagttaaccaatataaaacaggttccatcttgctaggcatggtggcacatgcctttagtcctagcagaggcagaggtggctctctatgagttcaaggccagcctaatctacaaagcgagatctaagacagctagggcagttacacagagaaagtctgtcttgaaaaaaacaaacaaaaaaccccaaaacacagcaacaaacaaaggattatttttaaaaagcatgtgtgcttttgcttcttctttttttttttgtctgacctttttcttttctgggagagagaatatgaagttagatgggtagggaagtgggaaaggatctggaaggagtttgggaaggggaaaaatgtgatcaaaatatattgtatgtaggagaaaaagacaaaataagcaaagaaagtacatatggggacaggtgatggctcagtgttgtgcaagcgtgagggcctatggtcagatctgtgatccctgtgtgaaaatcaggcatggcggtatgcttctacaactccggtgcttgtgggaaggaggtacgcagatcttatgattctgtagccagctagtctaactcaaaagataaagtttcacacgcacagaaatgaaagcatcttaaggtcacacaaaagtggaagaggaaatgcagagacagcatggaaatcagaaagaacatgctaagtcaggagtcacagaggcagccacagaagggactctaaaggcctgtcagaaatattgagggaaaaaatgaagataaggacatagggacaactctaaacttaaggccatgactggatagggccagtcatgtttcatggaggacattttaaagatgggacatcctggggcataattgtatgtccagggagatttaattatgtagggagggagtagggatcaaggacataagtggaggagttataagtttgataggaggaatgctttattcataatgacagtatggaaggcagagggcaaatgtgtaatggcataaaagctcagggagacagaaggaagcaggctgggaagttgagatgtgtatagtgcctgtccttcctccccctttccttcttttatcccttttcattcttttggtttttgagatagtgtcttgctatgtagatgaggcaggccttgaactttcaatgatccccctgcctctgcctctcaagtgctggtattaccaagctgggctccttatgagaatgatatttctgaattttatttttctcaaatgtaaggtgagattattatgggaaataaggatacaaagggctaaagggagtttgaaaatgtattgatctaccagtggaaaccatccatcatttattcagtcattgaacaagtaccaactatgttttgtgtgtcagccattatcagtagttcattcgttcattcaaaatgagtcagacatgattgcttccctcactaaacttagagtgaaagataacatatatatatatatatatatatatatatatatatatatatatatatatatatatatatataaaatcttatggtgaatttgaagtattatctttgtgagacctagtaaagggaccactaagacatgggagatccagaaacatataagatatatatatatatatatatcttaaaatcgacatggactagcagtagtagcagaactagataaaagcttatttgaggcagttgttaagagagacattgttaattaaggaattgttctgaatgtggtggctcaggtctgtaatcctagcaggtgggaggttgagacaggagagttaccagggagttcaaggcggcctgcttgggctatgtaataggttctaggctagtcaggaatacagtgtggtctcctgtcccaaaattaaattttgagtcgggcactagaagtctaaaaagacaaaaaggagtctgggaatgtggttcagtttggccctcagcactatgtaaaactggtatgggggtatgaaagaaaatggctcccaaagggagtggcagtattaggaggagtggccttgttggaggaagtgtgtcactgtggaagtgggctttgaagtttctttttctcaagcttccctcagctgacttccctttgcctgcaagatatagcagtctcagctccagcagcacacctgcctgtgtgccgccatgctccccccagtataatggactgaacctctgaaactgtaggcaaagcccttagtaaaatgttttccttataagagttgccgtggtcatagtgtctcttcacagcaataaaaccctaactaagacaactgggtatggtggcacacatcctagcactttgtctggggtggaggtaaaagcaggagtgtcagaagttcaaggtcattctcagctacatggtgaatttgaagcctgcctaggtctttgtgagacctagtaaagggaccactaagacatgggagatccagaaacattcctaggctcagtgtgttatgttttgtttaaattagatatcaagaaaaagaggaggcgcaagatgagacatattaagtagtttattataggcccggcagagtagggagactaagagagaagaggaacgggggtaatggctgaccgccatggctggtcgccatagagaggcagagaaagagtgtaggtgggagaagagcagagcagagtgaagaagaagcagagagagagcgaaacagggaagttggaacttttaaagggaagactgtgcatgtgcactgaggttccacgcatgtccagagtcctcacgcaggctgtaaatgcgtggcgggtgatgtggtgatggcacgtccctgtgtgtgccctgactgttgtcagggggcagggtctgtatcttaaagaggtagagccaatcatcattaaagcctgaacctttcacagtgaacaatgaaaagagtctggaatgtaaactttctctctctctctctctctctctgaaggaaccagcttcccttttggcagccataacagccgaacacgtgcttgccataaacctgccttggtcacttagaggtcagatgcctgtcttgtgacaaggaaccttggtcacttagaggtcagatgcctgcctcgtgacaaggaaccaatcagaagtcagctggtggcgctatgctttacgaccctgggtgtgctttacggacaagcgcacagcaatgacgtagagagcatagcaaccaccctgggagggcctatgggccataacaaccagttgaccaatcaacacagggcaagccctccaagcctggaagcacaccaatcgtgagcctgtgcgtaagcctgtgcgtacccctagacactccccttacgctgccctataagatcttttgggagaccgaaggagcggtcttttctagctgtccgccatggcgggtgggtgaaagacccgagctaacatggggttagctcgttaaattacaataaagcctcatgcagtttgcatcaagcttttgcctccattctgtgtttggggtggccgccgtcctggactaagattctggaagcctcagctttctgagggtcttacatttcctctctctctctctctgtgtgtgtgtgtgtgtgtgtgtgtgtgtgtgtgtgtgtgtgtcttggtttttgagacagtcctagcttccctaaaacttgctctgttgatcaggctcgtctcaaactcacagagatctgcctgcctcttcttttaaagtactggggttaaagacatgtgtgactgtgcctgacttgaatttaacttttctgaagatgggattcaatactaaatgcacatgttcatattaatagattagtgctgctctcaggctttgtcaaatagcctccttattgcagcagatttttaaaaatttatttattttggtagggtttttgtttgtttagttttttgaggtggggtttctctgtgtatcagctctggctgccctaaagctttctctgtagaccaggctggcctcaaaatcaccgacatctactgcctctgcctctcaggtgctgggattaaaggtatgcactactaccacctggcctgtagcagactttttttttcccctgagacagggtttctctttgtgtagctttggggcctatgctggcacttgctctggagaccaggctggcagcagactctttattggtcaaaataccttagataatgggacagtggagtgctgaaccttaaatgagacatttgtatcatcttctccaaagtttcagggaacatcacagaagggggcgggggacagaatgtaagagctagaggatagggggtaaactataggtgtggctactacacaagacctgcccaagattgggcccatgagggggtcatgaggccccacccctgcatggtggatcattgtcagttaatagttgctgaagggtagggtatcactttctttagtagtatagccaatggtaggtcacctgtgctccagtatataacctattcatgctcatgaaaacaaccctaattaaactcagacagtgggtctcacaagcaaaagagacaagaaagtaggtggtgggtttgttgggatgaagttttttagtgggaggggaaagggggaaggaagacagtcttagggtttctgttgctgtgaagagacaccatgacaactcttacaaaagaaaacatttaattgaggtgtggcttagtttcatgttgggagccaagaacttattccatttgacgtccaaacctccagagctccattctgcattgtattgcagatgctagctgatttgctgttgaatggcatagcctcagtggagaatgtcctctagttttgcatctctacaggactaagcatttgaataggcctgcaccaaggcagagggctaggtctacatgacagtgaggacaaagggtgaggaagtattcggcagagaggtctaccggaggagggacagttgagagagatctgttgatagggtctaggaagatgggaagaaaatggtctcagggtcagggaagaatggttagattatagccaggaagatgctgaataaaggagagactccagttttgcagcatggaactgagagctctctaaagatgacaagatgcctgtgtctggtctttatcactgttgggttgctaggaggttccaagtccacattcccccactcaggctgaaccttgaggcttccatggtttggggctgagacatgctgggccacgacagtttcagaggtttagtccattgtcatcatggtagtgagcatggttgtgtgcaggcagacgtggtgctggagaaggagctgctaaatgttgatatgtaggcaacaggaagtagactgtcacactgaatgaagcttgagcaaaggagacctcaaagcctgcccctacagtgacacacttcctccaataaggccatgcctacttcaacaaagccacacctcttaatggtgccactccctttggaggccattttctttaaaaccatcacactaaaggtgaaattactaaaactcagtgtgtgtgtgtgtgtgtgtgtgtgtgtatgtgattgccaaagaataaaaaaaatcataaaagatccttaaatgagatatctattctctcctcaccccaaggttgatatagctattctgtcctcaccccaaggttcgggaatgttatagaagctgtgattgtaagagccagaggttggtggaggacagttgtaaaacagtgtgttggggacatgacaggaagttgcactcatgaactctcacaagaactatatagttactactccagcatgaatgagaaggggctcccaaggcctgattcttagttggcaaactacagggtcctcttcacatcaaccatcactcaagacagttcctcaaaggaggtattctatatcttcagttttggggtgacttgctaggccagtttgttgagatggaaaggaaagtgattgacaaagtctttgataacagttgatcatattgtcactattactccataactggaggcaatgatagtttcaatcaactgccattggaacctgccattcctccctccctccctccctccctccctccctccctccctccctccctccttcctttcttccctccctctctcctccctccctccctccctccctccctctcttcctccctctttccctccttccttctttcctttttttttcttaaagattttatttatttattatgtatacaacattctgcttccatgtatgcctgtgtgccacaagaaggcaccagatctcattacagatggttgtgaaccatcatgtggttgctgggaatttttcagatctctagaagacagccagtgctcttaacctctgagccatctctccagcccctctccttttcttttttttagaagcacagtttcattatgtagcccaggctgactttaaactccccatcaacttgctctgcccctctcctgatgttagacccccgaaaactcaagtattcggggtcccaggccacgactgtggtcaccccaatcaccaggcagattcaagagcttgctgcaaactgcatgaggctttattgtaatttaacgagctaaccccatgttagctcgggtctttcacccacccgccatggcggatggctagcaaaagacagctcctagggtctcccaagagatcttatagggcagcataaggggaggtctaggggtacgcacaggctcacgattggtgcgcctccaggtttggagggcttgtcctgtgttgattggtcaactggttgttatggcccataggccctcccagggtggttgctatgctctctacgtcattgctgtgcgcttgtccgtaaagcacacccagggtcgtaaagcatagcgccaccagctgacttctgattggttccttgtcacgagacaggcatctgactttctagtgactaaggttccttgtcaggagacaggcatctgacctctaagtgactaaggcaggtttatggcaagcacgtgttcggctgttatggctgccaaaagggaagccagttccttcattcccccattttcttttttggaaattccaatcatggaattgctgtctctctagcatccccatcagggagtgatagatattggcacccccatgcaagggagttccttttgacttagcattttaaccagggaaaatggacgccgaaattcttttccaaactgcttcctgctgactttgggacgaagttagggaccccagaaggttgaaatgctagtcaaaagcaaaaaggaatttaggcaatggggaatttattaggggcttctggttagcagacactgttgcagagacagggggtgtccatatcagctggactggtttacgtccacagcaagtctagggctcgcagtctacttagaacagcctgtagtgagtactgatactcagatgtctgccagaagcagaaacctgtttaagacatgtttaaactaggaacagaggttaaaactttgaagcccgcagtgcagaaaaagcagatatctgtttaaacagcaggaacatatttataactttgagtcctagcaaaaactgcagatttgggctataagcatgtacatttttcttctgtccagagagccaggtatggattggacagaggtgcctttggcctgatgaaaagctctttaaatttgtacttagatgacaaccaaaataaacttaaaaaccttgagcttgtgcctgaacagtagatagttactattttatcagctaacatactgactagtctatagtggatctgattgactgatgctgtcaagctgacaaccagtaatatttcagagatctgagaagggtatattttatccgaatctactaaaaagtgacagaagccagttagaagcaagtccatatacagttagccatacccaagtttctccattaccgctggaggcagctgtctcaaagaacagcaatcttcgccaggcctatactgtgagaattttttttttttctctctgtggaagagggacatgaaaaagtctaggcaaagggggtacaatcaattttccagtgtccagcagctttgtccacagtctcggccaggttctggcaggcggcaggtatcacatctgagcatctcgctcactggtccaggtgcaggaactaggttgcctcataatcttctttggagattttgggtcactgtcaggatctggcagtctgtctgacattataaactttaaagataatgatttaaatgccatattctgaagatctctgaagcattagaggtctgtttgtctgttttagtcactttccttaaacacataagaagcacacaggtggctaggtaatgtcttatttctgaaattaatttccagtctgactgtaactggttttaacttagtaaaatgtttgaaacagcacagctgaacttaaaactgcatagagctaccttatattccttaacagtagcttaacttctttctgaggcagggtttttctgtgactttggagcctgttctggaattcgatctgccggaccaggcaggccttgaactcataaagatccatctgcctcttactcccgaatgctgggattaaaggtgtatgccaccaacaccctgagcttaaagatgtgtgctaccaacatcctaaacttaacttctaaaaacataaacataaacatcttataatagatcagcatctttcataaaacaagaactttgcattgtcaggctttgcttaaaaataattctaaattgaagctctttaagtacaaacattaataaaaacaaacatttgaaaaactggttttaaaaagaaatttaaattcccttaaggtctttctgtaatatatagaagcattaacattttaaatcttaactgaaaacttgtttctaagatggtatctctaatttccatgcggtcacctttagtcaagatggcggtttaagtatcctttttttaacttcagcaaaatggctaccaggaaacagaacattttaaaacaagcatacataaattacttgagaaataaacaggatttttaaaactgaattaacttgatatggttaaaattttaacttatattaccaattttaaaatttattgtttgtagacatgagaaaccatagcacagtttacagtttacatttttttctcacttgtaacaaccttttctctgaccttcgacaactttcctctgaccttctacaacttactttaaccctctataactttctgtaacaatctttttttctgacctccaacaacttttctctgaccttttacaacttgctttaaccctctataacttctatctcttgctttaactctctataaccttttagttcatttctctgactttcttagacattcttagacaaatttcctttttttctttccctctttattatttaagtctcctacattttttctcatttctcagtcaacataaaaattttgtcaaagtcccttttacagttcttaataactttaaggcctttttttttttttttttagaacatccggatcaggacagatggttcacccgtctgagctagcttcatgtgctcaaggcagagagacctggggtgggggtgctgctggtaaccccagacccttggccaatccaggggtgagaaaaagacccctgcagtccccctgcataccatgtgtgtagtgcataaagaatgccgggcagctaggcaaatggcagggacccacaggacccgcaagtggggatagggaaagactcacctacatctgccaggctcagctgtggttcgagttcaaaaaagcagcctcgggggactccaacacaacacattgtaacccatgacacatggcagaactcctttcccatgccacgtgcttagggcagcaagaaaagacccctgacccatgcatgccacaaatatgaaacatggacaacatggacagacattagacaggacaaaccgcggcaaagaaatggcgccccaaaccaaaattacaaacaacccttggacttacatccagggcagaaccaaggattccagaaacacgtctatttctgggcccgtgagtcttaccctatggttcaaatcaaacgaccctcagactttcgtccagggcaggacttcaggctttcgaaacacgtctatttccccatgaagtccaaattccaaataatacaaattacaaattctgtgcagatcaaattcaagtcatggcaccatacaaaacagcaagagacaaaacaagcaaacattgaacatttaacatataagttgcgagctcgaatcatcttacctccaagatcgaatccactgaggtgaagggtggtcgcaaatcccggacgagcccccaaaatgttagacccccgaaaactcaagtattcggggtcccaggccacgttctcggtcaccccaatcaccaggcggattcgagagcttgctgcaaactgcatgaggctttattgtaatttaacgagctaaccccatgttagctcgggtctttcacccacccgccatggtggatggctagcaaaagacagctcctagggtctcccaagagatcttatagggcagcataaggggagtgtctaggggtatgcacaggctcacgattggtgtgcttccaggcttggagggcttgccctgtgttgattggtcaactggttgttatggcccataggccctcccagggtggttgctatgctctctacgtcattgctgtgcgcttgtccgtataacacacccagggtcgtaaagcatagggccaccagctgacttctgataggctccttgtcacgagacaggcatctgactttctagtgactaaggttccttgtcacgagacaggcatctgacctctaagtgaccaaggcaggtttatggcaagcacgtgttcggctgttatggctgccaaaagggaagccagttccttcactgagaaatggggttagaccttttttgttttttaaccctttatttattctcttttatgtgcacaggtgttttgcctgcacatgggtatgtgtaccatgtgtgtgcagtgctgtcagaggccagaagagggtgtcagaaacaggagttactgtgagtggccatgtggattctgggatgcaaacccagctcctttggaagagctgcctacttcttctttctccccccaccccacttttttttcttttgattttttgagacagggtttctctggctgtcctggaactcacagagatccacctgcctctgccttccctctgctgggattaaaggcatacacggctgccaccaccacccagttttttattttttaaatgcaatgtaacaatgtgtatgctatctttaaaaagaataaaaacaataacaaacacagtaatataatatatgttatttgggggactaatttaagaaaatttttcagatcttgaatttaataatagtatgagtttttatttaatgtttcttatccaaatacacatccttaatataattacatatatgtacattacctatctacatatatatccagaattaactctcagttttcctaatgcttcttctgctttgtaggaggcttgtgaagtggttcaaaaataaactgtctataaatcctcatgtaccagaagtagctcagaattagaatgctgatgaatgtgagcatcaagacaaaaatcaaggcagccaccaggtagaaacttgggctagaataagaacaacaaaaaagaagccatcagaagccattattcacattctgcctgttaatttactcagtcaaggtgtcttagaaaggctagctcctctgctggtcacacagaacagaatgataagaccaagcatcggtcctcaaggaggttaaatgtttgaggttgatcagtgtgctcatcaggagaggggcgcatgaaggagctctgtgaagtggtgtagacgagagaccccagggtgggtaggagtcagctagtggtgcctggcagtagaggaagtgactatggctaaacggtgttttaggcaaagggagatgtatgtgcctggagaagatgccatggaaacgtgaagaaaccttggggtccttctaggacattctggaatggagcctagttgtgtgtgactatagctgcagagtcagacagtgtggctagaaatgaggcgtgaccaaggattggggatgtggttcagtgctagagccccttgtccaataggaatgaggtctgggtttgccttctagtccagagggaaaaaataggtgggcaagtgtcagattaagaaaaagcttacactaagtagagagtatggagtttagacagaaggcaagaggggtttcatgggtatggataagatgggagttgtaagagatgatcctgtgagggatgaacagcgaaggtcatggggaccagttttaaggtgtttgtaatgatggtgtgggtaaagggatggagagatgtggttaggtccaagatatgtttcaaggttaaaatgggtttgtcttggcaattgttaagatgtaacacttcaggaatttgaaggaataaagagaactgctaagtatggggaacagtctccgcgaggatggtgtcactatgcactgacagcaaattcagagggaaggagacacacaaggagaactggttttagtgtgctcccagactggcctggaattcctgagctcaaataatcctctcacctcaggctatagagtaaggggtgctacccttacaggctcagggcctggttatatgactgaaaatttatttgtgaacgtgtgtgagagcatatatataagtgtgtgggtatatatgtgaatatatttgtgagagcatgggtaagtgcgtgcgtgcgtgcgtgcgtgcgtgcgtgtgtgtgtgtgtgtgtgtgtgtgtgtgtgtgtgttggaagctactctctgctggggcccttcgggtcttttcacctaggattctgtgactgtacctcccatgagaggcggcttatttcttagtctagaaacttaagtgttgttttctatttgagactttaatgtctgactagaacacttagttgtggtgttacagtttctctggacctgcagttatcttagtgtgattttttttttcttctggggccaagcaaatggctgtttcctggaccttgatcagcataatttctctctgttaggcattgtgctgagatgggagattcatgggttccaggccagccttggtaaagccaggaaacagaataaaactaaaacaagcatatacataaaaaactgcagcattatcaggtactgctcattaccggggaatcactccgaaggtctcaatcgcaaaaatagctgttaggttacagaaactgcaaattagaaaaaatggtattaaaggttaagcagaacgtatttaaaataatctttgcatctctatggtaacagtcagatcatatgtaaccttattaatgtgtcattttttttgacaaggacacaatagatagttgtacttacagaacagttatgatggtttttctgttgatgcatctttaggctagataacctcacagcattacacatgttgggtggtagtttccaaggcaacggtcataatgacattaataataatgaacaatcataagcatcttcagaagtactacacaattaactattgcatactgagccctatgatcactgaagatgggtgctaaatgagcatttactacatgccaggtggtatgcagaatgtaaagttggggctttttacccaggcacttaatgtacttctcagaatcctataaagatagggattgttgaccacttatgaacaaattggcaatttgcttagttctgaatttttctttgtatggttagaacttggaaggtgtcactgttggggtggtagtggtgtgtgcctttaatcccagcactggggttggggagcagaggtagacagggtttctctatgagttcgaggccagcctggtctacagagtgagttccaggacagccaggactacccagagaaacactgtctcagaaaaaatgaacaaaaaagagaaagaaaggggtcactgtgtagtaacagatggacggatgatgttaggacatgtatgtaatcacataatttggaaggctgaagcaagagattgcagattaactgtgtaggagaccttgtctcaaaaaagacacaacttcacaatcaaggaaaagaagtagacaagtacttaacttttttccccagagacagggtttctctgtgtagccctgactgtcctggaactcactctgtagaccaagctggcctccaactcacagagacccatctgcctctctgccttccaagtgctgggattaaaggtgtgtgccactgcctggcactttaacattcctccttcagaaagtgacagggcagatggacagaaaatgtgtctatcagattaatgctattggagatttgttatctgttgtatgggaacgaacctgtcttccttttctcgttgctaaggtcaaacccctgataaaaacaactaaaggaaaggggattaccatggctcacagttcagggcgtggtctatcacggtggggaaggcaggacaacagcaccctcgtgaggaagctgtgggtgacgaatgccagagcgcagctcacattcttttcacctggttggggaccccagcacacagaattgtgctgcccacgtttttagggtgggtcttccctacctcagtctaatccagaaaagttcctcacagacacatccagtgacttgtctttagttactctagctcctgtcaattgacaataagaaccatgcatgacaaaatgtgaagactgtttgaagaggtctgtttgaggtgaatttattagatacgagtttctcatctaccttcaggctgggtccagaagaaactgttcatcacagcactgaaaattgtatccgtatcagaagctgagtggagagtcctgaggtttcaggaaggggatgctaccatagaaatgggctcttccattatggttagaatgacacaaaagccaaatggatttactattggagaaggaaagtatggtaaccatcgtagaaaacacttggctggagtggatctttgtgtatggagaattgattatgggtcctctttggctgatatgacaaggtctgggttgatttcacaaggaacaagtgataggttacttgcttagcatgtatgaggcctcggctctgttccagtattgcaaataagtaaacaaatgaagttaaattaatcagtaaattaaaatcaacatggcaggcctagaacagggacctcaaaggatgtggtggtagtggagacactgccaagcatgtgcccctgagattttcttttcaggcctgaagcatttgtttcctctcaaggggaccagtgtctgccaggacttacctctgccaaagttacaccccctttttgggaaagtctatctcaaaggctagtgattcagaggcacagagagaaacttgtccctttctgccagttcagagcagctctgccaggtacccctactctagtattccttgtgaaatcaactgcaggtttcattggggctgcagtttttcctacttcctcctctctccaattttatttccttcacttcctctaaaggtggcgatctcagaccacttcccagtaaacctcctacacatcagtctatgccacagagtctgcttcctgagaaacctgagatgtaaaatgtagaccacctctctttaagtcatctggccaagtgtccggaagactggcaaatctggggcactgataagattttcatgagctcggtagaggctcttcccagggttatctaatcacatagctaagaagcagccattcatttaataaagtattcctccctcactgttccactaacctcacagccagaacaaaccagaaacagtttgttttttttttttctccccaggactacctccactccatgaacctgctgctgcagagtctgtttttgaacagtatctcatgggtattgtgttgatcccgtatccggatgctgtaagatttaagtgcagttggtgacacacgagtgacaagcccacacatgtggggctcctgatgtgcctttgaaggtgaaagccaagtccttccttgctccttctgctcatgtccagataaaagaattgtcttgttttgttgttgctgctattgctttatttttatccactttggagtttggagataacctataccacatttggatagacatatatgttccaggttatttaatcctactgtgaaactctgagactgtattaataaaatcaaccttgggtcagggggcagagccagcaactagttgataagaattagccatagagagtatggaggaccaggaagacagacatacacaggaaggagtagggagggacttagggattcatggtctttttggtttgggaccaatggagagaagttctcttgctttctctctggccaaaaggaaggtcagctggttgcttctcggcccatctgagccatcaggttttcactccatcatctgactcctgagtctttattggtagacagaatgatagagacttagttaaaaactacatttggcagcagagattgagccggtactggtagggattgggaatcctgctagatctcagcctgagcagcagagtgctgactgccgggcagcagggctgcagatggttgttaagataccagaagattcagttgtagctgctaaaccaatggaaaaatcacacacacacacacacacacacacacacacacacacacacacacacacacacacacgcaccaaaaaacccaaaaaccaaaaccagaaaaacaacaaccaaaaacccaaaacaaaaaaaccccaaaaccaaaaaaccaaaccaaaacatcaaaaccaaaaccaaaaaaacaaaaaacaaaacaaaaaaaccccaaactcttagactggaacccagggcaaagaacttttctacatgttgcaggtgattcaaacagtgcggagatttggctctcctgacctgatcctgtaccactgggtgaccatgaaaccttggctgcctttggccatgtgttatctctaatgtctaagccagatgtgatctgtagcagatgtgattctgtcctgaagggcaagtgataaagtaaagtataaagtataaaaatggcctcacatgcacttagcagttgattgacagctcccatttgcttagacattgagagtccttcatggctttcctgactataaaggaaagagaggaaagagatttgcagactgctgtgatgcagatgtggacagctgtggctctgcttagggacagtggagaagaacaggccttcctgagtacaaagcttcatgcaggtgtttcttcacttttcctggaggacaatgggctgctctgtgccataactgtgatgggaattgaatattagatacatggtgaggatatggaagagataaaaacagatgagaaatttaaggaagcacgcataaataggctcctcggtgagattctggagtgttcaaatgtttgggtcttgagtgactgtttatcaccagagaaggggcttttcctttgtcatgtgactgccctgtagctagcatcttttcctagctatccaagtatttcttcagtgggatcatgaataacatgtctgtggtgcctggtgtggcttcactagccactaggctgatctggatactgacactaccaagtgttgaattttccatcagcagcagcagcagcagcagcagcagcaggcagtctgaatcatcacacaggtgcattaatccagaggcattagacagctatctgctgatggctgattcttcctgtgacatgcttgggcttgaatttgcccttttttttgtgtgtagcttctgcttgaagcactagacagaggcatcctgaatgccatgcatttttatcatgtcccaacaagattgcttctgaccaaagaactagaaggcaagagggctgatatacacagaattcattggtctcccagtgtagtggatatcctttcaaggcatcttttgtattaatagggtaaccttctgttgctggtgacctaggacatttttgacattcacccattgttcttatataaatactaacaaagcttcactttactcttcgagcctcaggttttgataataaattacatggtaatgagagctataaagccagaatgaaaggttaccaaggaagctgcagagttcttacaatgaggtagtactcagggtcagtgccaagacaaggaatttcttaatcccactgccagaatatgagttttagaatcagagtgacggaattgggagtcactcaatttttcatttataatcaaggcatatgtgggtagggcatgtcaagaactcagattccaaagaaataaaaacattttcttccaggatacaaaatgtggtgctgattaaagacacacagtacataaggatgagaagccaggtgtgatggtccatgcctttaatcccagcacacaggatacagagaggaagatctctgtgagttcaaggccagtctggtctacatagcaagttccaggacagccaggactacacagagaaaccctatctcaaacaaacaataactttagtatctgtgtctatttttatattacttatatgtgaactaactttgacttttcctttttttccccatttctcctactcatatattacatatagtaggtggattggtggtacatggtacagaatatgaagtcaagatcatgacaaaattaaaggaggaacaaatattcttttgagaatttggacttggcactagatgcaataagactgatctgttccactctggagggtaagtatacttttattgcttaagtataattacattatcataaaagaactcccaaagttgagaggtttgggacaaggaaatgatgatatgaattgtaatggatatttgcttagttatttcaattcactcattttctcttcagtttcacttagtccctttattttttattttaactgctttattagcttgcattcattgtacaagatcatacgaatactatgaacatccatcaaagtcatcccacattgctctctctgttcctctccctgtcccccactgggacctttcttcacccaaagtagtactacttctacttgtctgacttttttttaaaatctagattttacctataagagaaaaacatgcactactttctcagcctagtttatttcacacagcatgaagatctttagttccatccatttttctaaaaatgatattaactttgctctttttatagctgagtaaaactattacatatatattcatatttcttaatccatctcttggtaaacaactaggctgatattttctgattctttcatcacaccattaaaaccttttcttaaaaaaataatattcaagctgtggtggtttgaataagaacaggctcatagatttgaatgattggtcaccagggagtggcaccatttgcaaggattaggaggtgtggccttattagaggaggtgtcctgagggtgggctttgaggtttttagaagcccaagcctggcgcagaggcttcctcccttttccttctacatgcagacctggatgtagaactctcagcttcttctccagcaccaagtctacgggtgctgccatgttcccaccatgctgataatggactaaacctttgaaattgtaagccagccccaattaaaatgctttcctttataagagtttccatggtcatggtgtctcttcacagcaatagaacatggactaagacacaagcatacatattgtgtgtcttgtatctaacaggcctagcattgggaggctttcagggtttttttgtttgtttgtttgtttgtttgttttgtttgtttttttcgagacagggtttctctgtggctttggaggctgtcctggaactagctcctgtagataaggctggcctcgaactcacatagatccacctacctctgcctcccgagtgctgggattaaaagcgtgcgccaccaatgcccggctctgggttggttttataggtagttgtttctactggttcttgtctgttcttgtctgtggtttcttctctttctgtgtggtttatttgttagactgtttccttctgggtgttttggatgtttacatttaaagtgaattcttccagaggggatatttgtttgtttctgctgagcatatgggaggcataaacagactgggactgtttcaaattgaatttttagctatagtactatctctggtgaatacttagctagcctaaatatctgctcaaatctaatgagggtatattagcagttacaattcttagggaagtggttcattttccttctcatctggagtcaggactgataaagatcctcaacatcttctcctaggattctatggttcacagatataggttggctgatataatcttcctgtttgccagtctgtctgtcattctctttttgtatcactaggcttatttttctacgttctgttttcaaactttccagagttgggcacatgtaggaatagaagatcaaagttttatgtagctagtcccagtgacatccatgccactattataccacccatgggcatatctcgaaagccatactagttgttgtatctcacagggttcgcagctggctcaagctgtctttcccacaggcagcctgtatagcaccttcaagaaataggaaaagtcacccaatagggaggaagcttcttggtcagtattgatttggtcaatttgatttctgtgtcctgtcaccaaggtgtggtgtcttcagctttagcatctaactaaccagttcttcatactcatttggggtctgtagggtaacactgaccaacaactcaaggagaggtgtaccacacctagctttttattcagaaacctatggcttctggaaggaacattataccctgagtagggcaactccaattaaactctaactctctctctctctctctctctctctctctctctctctctctctctctctctctctctctgtgtgtgtgtgtgtgtgtgtgtgtgtgtgtgtgtttgtgtctgaagcttataaagtagtaggtttctgtatggctttttcaaacatccttagtgttgttgctttccccacttctttctaggctctatccttctatcccttgctccacttaaaactcctctttcttcctcccttcatatcatctgggttctactatcccaccctcattaaaaccattcataccccccattaatggtctcttagtttcaggcttatgccacaagaggaaatgctgttaatctgaccaagaacccaaggtcagggagctcataggcttattactattattttactaaatggacatagcaccaattgcttgctaaatttgtgtatctatacccatagatttgttcagccctcggactcaatcagagatgtttctttgtgcagtggacggcagctaataaagaaacttattacaggttaaagtacagaaagtgtttgttggtggggtgctcatccacaaataggacatctatagcatactcctttctgccaaatccagggactgttgagctaggggagagggtcaatggacagaaaatgcaatagtcaaacagtatcttatagacacaacaggactgctgcacacaagaacgcagagtctgtggttgcctatacgagatatgtacaagatcaaaccaatcaacatttcagtatgcagagaggagggggtcaggagccgctatccctagtaaggaaccattgatagttgatggcttctgagggaagggaagccagttttctttactggtatggcccctggtaggttaattacaatgcaatggatagccccacatccatgagtgtacaggtagtacaaactggaatcagtgggctatttaggaaaaaacgaaaaagacatgacctatgggggggtgggatgggatgctggatttgggaggagttagagggaagaatgaagggcaaatgtgatcaaaacccatcatatgcaagtacaaaactattaaaagtgaatgaaaatatgttaaaaaatttatgtggccatttccatggctgagagactcatgtacttagtgcccgaatattagcattcagcacccataacatggactgggtgtgtcactcactccatctcatggcaggtctcccatgtccctccaggattcaggcaatacttcctctatttgatcgcttgccgaccatttctcaaaccctagattccttgctattttcacatacactctgtttttcttttgagatagcagggtggttcctagtataatggcttaagcctaatttccttattaatttatatatttatttgttattttgagactcttatcaagactggtcttgaactcctgggatcaagaggatctagtggacttagcccgcacagtggctgggatgaccagctagtactgccatgcctgacaaagtctagtttcctgtcatggggcacataatggaagccatcagaaagtgtccatattttctcctgacactggcaagagcccccttctgctgtcacaacgctctttagcctacccattgccagtgcactgtataagctgcctttaaactggagtggttctctgaggttgctcccttgcttggaaagaagcattttcctccctgtgggcagggaggaaaatatgccgcactcagaatgtctgaaggaaattctttccattgatcttagcaactcccagcctccttgggagtagactggagacttatggatgtaggactgaaagttacaattctcttaattattcttcgatctttccactgaccagactgcatctgaaactacctaagtgctgccagtcatcaacgaccttattagcataccaagagacagatgattgtgaagaatgagtagtgtttttatgctggggagtgggagggacaaaacacattgtggcatttcacaggttcacagtgctgcacctctcatctttaagcaggaaagcccacagaacgccaaagatagtgccacatcactagactcccattcagtcattactaactgatacagtccgcattgcattgtatgaatcagtctcccagggctaagcacagggccttatgggcttccggttgctctgttttcttatagtggtaggatggaacccagggccttgcacatggtaggtgtgacgatctaccttcattgtcagcctgactgaatttagaatcaccatggaaaacacctctgggaatatgtaggagggtgcttcagcaatgcctgactgaggaaggcccatgttaaagatgactggcacaattgcctgggctggggtccatgggaaaagagagcagagccgacctccattgctctgtgtttcctgacttcacttgttgacttgctgcctcactctcaggccactatgccgttattgccaggatagattttactctcaaactttgagccaaaatacacttcctcctttatgtgcttcttgccgggtgtttggtcatgtcaatggggaaaaaataaccaatatgtgtgttaaggggacacaataccagaatagaatttcaaaccaagtgatccaattaacagttgacattatatctcctgcttccatagagtatttgctatgactactacaaaatgaaaaacaaacataaataatagaataacaaaaattagatattgggttggcatcaaattaaaaaaatataattaattttaagggggaaatgtcatataaagcatttattctcacctaaagtttggatccaagatcttcacacgaaatacatacattccagaatggtccatgggccattgcaaatggtttttattagacctgtttaaaatctcatatggttggcttaggtctcctggcttcccaatagcataagaaaaacaaggcttatagttctgggcaagaagcaaagattaaaaaaaaaagaggttatttcctgaaaaagaggttatttcctgactgtttgttacaaaatccaattcatacttgtgagatttatttattttaattttatgtgtatgagcatttttgcctgcattttagtgtaccgcctacatgcactacctgtgtaggttgaggacatcagaaccctaggaactagagttacagatgcttgtgggatgccttgtggattctgggaaccaaaaccaggtcctctgcaagagcagccagtgctcctccccaaagaccatgccatccagtccagactctcgtatcttggaaagtcattaagagatgcaatagctacccctgcagtgccagagagtgcctggcacatctcctaccggccctcactcatggtccagggaggaagttccatggggatgcctcacatagaccaagatatccttagtttagtgaaaggccaggatgtcaagtaggagtgtgggaacaggagcctcagtggacacagatgagggttagtttttcaggaggagttaaagctataaagggatatgtttgttatggatacagccttagtagcaaggcagagatccagctcagccatgtgcaaggtgggtctaaccctatgggggtaagattgaccttggagtgagactgctgggctcatctaggaatggacgggatttcatccacatagagtgactgtcacctacaactctaccacctgacaagtttatttgggtctagaactttgtgcttccatctgtactgggtcatatacttatttccctatcacggatgtttattgtagttaaattctgtctatatatgttaagtaaatagcactagattatttgatggtatttatttcttgatttttttattgcccctatattttgaggcctcataatccagagctaccttgggtatagtctatgttcaatatactgggtatcggaggtgaatatatttcataagaagcttatgtgttcagtcaaatgaagtataagtttacatcatgatgaaagtagtaaaaatccacctcttttaccatttctcacctctatttaccttcctgtcactgcatgtctggcacatttataaaacagtatatatgagtgaagaacaaataaaacgttcacagtttttatgtaaattaaattgaaaatgcataatatgccaggcattgtggcagatactttaatcctagcacttgagaggcagaggcaggtgtatctctgagtttgaggtcagcctggtctgtatagtgggttcccagacagtcagggatctatagagagaccctgtctcaagaggaaaaagaaagaaagatagaaagaaagaaagaaagaaagaaagaaagaaagaaagaaagaaagaaagaaagatacaaagtattttctggactatgggagttcttgactactgaggtggttaatgcatggagtcatgaaattgatgaaaagaatatgagacatttgcactatgtatgggaactgggaatctgctcgccatcacaaaagggccctggttaccaggacctgtttgcctgcatcattgtgcgcatttttatatatagacacaggagtatttgtattctttctaattcacttctttgttctttctttttaaagagttactcattattatgtatacagtgttccacctgcctgcatgcctgcaagctggaagagggcaccagatgtcactgcagatggctgagagtctccatgtggttgctgggaattgaactcaggacctctggaagagcagccagtgctcttgattctgagccatctctcatcccgctctttgttacttcttcatacaaaggatgatacttaccaatgggtgtcacgtttgatgttgcctttcatattgttggagtccccattcaattattatctttccccctttccttttcatttgtagcatgtggtcaagctacttagtgtctgagaaaagaaatctcccccagactcacaaatgcactccatttctaaccaaggacttctttgtctaggattctcagccatgttcagagattcagaccccatcccatatcacagaaaagtagacagccctgcactggctgtgctgtccatatctattctcacagagacttgaagaacctacaaaaatgctacttttgcttatgagtctttcagatatttttctctgagaacttacagtgcctagagctacttcttgttgtggaatatccctttgcactgggtgaagatgtgtcactgtgattggtttaataaaaagttaaatggccaatagctaagcaggaggtgtaggcaggacttcctggtagagctagaggaagtaggaggaggaatctaggcatgtgagaaagatgccaggagatgcagagcaagcaggatgggcactacggagatgaggtaataaggccacgagacagaaagtaaattaacaggaatgggttgatttaagttataagagatagttagacgcaagcctaagctattgcccaagctttcatgattaataatgtcgttactggggagccaatggtcccaatgaaaatgttcaactataacttctcagatgcacatgccactcatccttgcagaaacagaaaggcgaggcaaccatcagtgcagctctaagaattagaggctctctgtctcattgtaggtatatgttccaggttgagttaatatgctgtaatgccctgtggtaggagcagcctcatttctcaggatgtagttggaatcacagtactagctttccacactaaccagattgtagctgtggtcatgctgttcaccatgagctctgcttttcatatgggaatatggggattgaggacccagtgtgttctccccacaatcttttcagtggcttcccaggtataggcccagatcaccaatgccatcttcacccaggacttttacaaatgtaagtttagggaccagattgtatctcagatacttgcaaaagctcacacaaggccctggttgggaagtgttgggaagagaaagaaagggaggggaggggagaggagggtgcagggtggagtagagaggagggaaaaggagaagaggttagcagcgttttgggccccacttcagatatactcaatcagaaactcaggtgagaccaacttagctatttcaataagcctcccagaggatcttctctgatgtctcctgaagcttgagagccactggattatctcatgttgcatcaggttaattgcatgattgttaaccacccagctacccattccttcctagagtactgaggtggtctctgtaagatttgttctatagacagtgtttgcccaaccccagatccttgggtgcctttcaaaaaacaacaaaaataaccaggaattcaagtttggtttgaactgaattcactattactttaattcttcatgattttttcttgtttgtttgtttgtttgttatttttttgtttttcgagacagggtttctctgtgtagctttggagcctatcctggcactcgctctggagaccaggctggccttgaactcacagagatccacctgcctctgcctcccgagtgctgggattaaaggtgtgcaccaccaacgcctggctaattcctcatgattttaagtagtaagtcttccttagtagaggtgggtgagctattgttcattaattagctctagaaatacacaatgtaataatacattaactaaatagaaattagtcatacaaatgcatattaattatctacagtgagttaaagactgagaatatagcagtgagcagaagaacaaaattcccttctctcttggagcttgcattttattttgttttttgcttttatttatttaagatttatttttagcttgaattatgtgtgtctttatgtacgtgtatgcttggaggccagaagagggtgctggatcccctaaagctgaagttacaggcagtcaggagccatctgacatgggttctggggtcctctgcaagatcagtacgtgctcttaactttagtcaggccagctctccagcccttagtatttacattttagttggtcatctaggtaatagatttttaaagtgggctgcataatgtgtcaggaagttataaatgctcacaatgctggagaaaaacaaggcaagagagatgaaggctgtcatgggagtgatggccaggggagagctcacagactacttaatttttaaataaagaaataagatagctggtcttcttttttcttcttaaaacatttatattatttctaaagtgttgttttgtttttgtttttttttttgtttttttttttttttgtgtgtgtgtgtgtgtgtgtgtgtgtgtgtgtgtgtctgcggaggccagagatgtcaggttcctctagacctagggttacaggcagtttggagcctccaaacatggtgctgagactaggctcttctactctgttgagtagttaagtgttaagagtgttcttaacactgtgtctcctctcccaccccggaagacagctaatcttttaaaaggctcagtctccaaactttaatgtatagtggccttttttttttttaaagattttatttatttattatgtatataacattctgcttccatgtgtatctgcacaccagaagagggcaccagatctcataacggatggttgtgagctaccatgtggttgctgggaattgaactcaggacctctggaagaacagtcggcgctcttaacctctgagccatctctccagcccccatagtggtcttttgataacaggacaatgcagattttcatcagtgaatattaaatttctaccaaggaatgccggaaaaaattaaagacaagaatttttgaaataattgaaaaagtagtatttgatttaccctaagcaatttaaatccaaagtgtttccatcaatcctttgttaatctccaatgccaaatttagtccttttcttacctgaggtccccagacatcatccagtgggaggccctggttttgctccatcatcgccttcaaggtctgtgcttcgtttatacaaccactctgccaaaacatggcaacatgtgattatggagaaggcatcataatactagcttattttagagtatctaatataccttgataccactgaaaaaattgtctttttaaaaaattttcaaaatacagttttttttcactacttaaaaacaatacagttttaaacactgaaaaagttcaatacagtggcatcatgttcatgcacacagtgtaaccacacctactgccagcaatgagttgaacaaatcctcacttctttctcctgtagcccctggcaaccaaattctactttctgctgagattttcttttctttctttcttttttttttttttaaccaactaatgtttacaagtggaatagctcagcatttgcctacatttagctttgtttcatttagcacaatgtcttcatggttcatccatggtataacatgtgtgagaatttctaatttccttcctttttgcatctaggccatacccactggaagcaatgaatacattttacccattggttcctctgttgatggttgtttaatatttaattttttcattatgcagagtgctcacagagcactggtatataatgagtccttgctttttattctttttcaaaaattgtgtgtgtgtgtgtgtgtgtgtgtctgtgtgtctgtgtgtctgtgtgtctgtgtgtctgtgtttaagtgcatgctgtagagtggatgtggatgccagaggacaacttggggattccttccttctaccgcctgggtcctgggggactgaactcaggttgtcaggcttgatggaaaggttttgtacccttgagccttcttgtgaaactagaattgctagattacatgagaatttggtagacttttataaagaattagcagattattttccatagcacaaatctcttccatttattttaaacctcctttaatctgaaaaaacaaaatatagatactaatacaaacccacacaacaacaaaaatccttctactcctgatttaaaaaaacaaaacacctgaaatgtttcatggagccctacaagcttcttagcttctctgaaagtctccacagcttccccattcctccaaacaagcactgtcttggcttttgtaggcatcattcctcacagttcttcagagtttcctcccgggaccgtgcatccccacacattagagtctcatcccttcacaccttttgacacaccattttatggcttttacacaagattctgctttcttccttcccttacagccttggctattgtagcactgtgaacacgagtgtgcaaatacatcctggagaacattctttccactccttggagcatacgggcaagggcgatgagaactggcagttgggctttgaatttctcatttgctgctttatgcttcccagcatggaggtgccctttacaccccaacaactgactatgtcctcactttctctccaccaccaatgcttattgtttttattcttgccaagctagtgtacgtgaaatagtgtctcactgtagatttaataggtttcctgaatgttctcaaatgtcaactagacatttgtacatttttattggaaagatctattcaagtcctttgcccccctttaattgggctgttctgttgttgaattgtgggagttttctgcacattctagacatttctctctcaaatatatgatctgcaaatactttgttccatcacatgagctgtctctctactctcgtgtcttttgatgcacacaatgtttagattttcttaacatccgctttgtcatccctccccttccccttcttttttctcccttcttctctccctctctcttccatttctttccttttccctcccctcttttctcccctcctctttctctccctcttttttcctctctctttctttcccctgtgacttgatattttagccaaaaaatcattgcccaaaccaatgtagggatgatttttcctttcattttcttctaagaacttacagtttggggtcttaaatttagaccatagatccattttgaattacgactgaacctgatgttaggtgagagttccattttactttctttttttaaatgagtattagtgttgctgcccgaatgtatgtctgtgcagcatgtgtatgtaatgcccacagtgatcccccgggactagagtcacagattgggagccaccgtgtgggagctgggagctgaactggaaaaccctgtgagagccgccagcactctaaaccactgagccatccctccaaccccgccactttacgtgtgtgtgtgtgtgtgtgtgtgtgtgtgtgtgtgtgtgtgtgtgtgtggtgtgtatcagtttacccagcactattttttgagtacactgtctttccctcacagagtggttctgtaaatcacttacgtgctgtggaagggatacactttttaaatgcccgggacagtgttttacatggtcagttattgtattgaaatctcttttagtcgaatgatccagctatcctagtttcaggtattgacatatatgtcctctgtgtgtggccagcaggtcagatacaggcaagggcagggcaaaagaaagatgaacatttacaactgccatgatagatgcaagacttatgcctggaaagagagccagtgacagaatcagctgtggagcctgagctggagagacaaaggaagaaaactggtaatgataaagagggagaagcaaagggttccacatgtctcagctatgtgaggaccagcaagtcaaggaggggctgcagccctgtgggtgagctgatgtctgagcttccattcgagtctaatagaagctgtgttatccaaggtctatgttgttcacaggggtggatgtggtcaaagtctgactatttgtattgtgatattgtgatgttagcaatctttttttatgtttgtttggtttttctgagacagggcttttctgtgtaaccctggctgtcctagaacttgctctgtagaccaggctggccttgaactcagagatccacctgagtgctgtgattaaaggtgtgtgccactacacttgccttatgatatcaagaatgtaacccagaacactaggcaaaagctctactactgaaacaaaatgactttttatttgtttgagacagaagtagccccagcttgcccacaacttgataaatagctacacatgactttgaattggtcttcctttctctctaagtgttggggttacaggtgtgtcccatcacacccaatctaaaacctaactcaattttccctggttacacatatttatttatttatttatttatttatttatttatttatttgtgaatagtctccttgaagcatgaattaggaggccaagtgcttacatggtggctccttgacattcctctgtctagtccatttacaggtggtgctgtaatgaacaatgtgacagaattagggaggatgatagacttcctgcttaccctgcagtcatgagaaccagtcatgggtccacacaaatgggtctgggaaatgtagtctttgtttacagttttttttttcccctcagcaatgcctctatgcaatggatgaaagggttatcctcagccgggcattggtggcacacgcctttaatctcagcactcgggaggtagaggcaggaggtctctagagcgagtgccaggacagaccccaaagctacacagagaaaccttgtctcgaaaaaaaaaaaaaaaaaaaaaaccaaaaaaaaaaaaaaaaaaagggttatcctctggcttccacacacatgtactcatgtgcatccccaaacaaatgtgcaaacatacatgagcagtttaaggaggtatcaatggggaagaagtagattacaaaggtcttccttattggatgctgaacaagcccaggggaatgtgtggagactggagactgagctctcacagtggctcagtgaaattcaggtttcctggttggtatatcttagataattaatctctaatgagaaaaaagtgtcacatagaaacgagtcactctggttttctccgagcctgagaaatcttaggaaatacatgctgtcaacttctagaaggctctatatccatggaaaggcttcaagacaaagaagcccacagggcctgggaagagtgattgcaaaaagcagaataggggaatcatccaggaggctgaagtcagctagtcgtggaggatacaaggcaatgaggagagagctgagaccctgaagccgtggtcagtagggccagatgatgcaaaggcacggagaaagatgaccctgaagagcatccatttaatttaggaccaatgtgttaaatgtcttaaagccaaaggtgaatctgtaaataattaaacattaaacacagtttggacagaaaaaataatcatatataattgcatcatcctgctgttaccttattttatttttttgacctttcttctggcagttttataggacaacaactcctttttttccagagatgactctcagtagtcattgactttaatatagagttgacatcctcttttacttattttggcttggtttcacttcccttagcaaagttacatataaattgaaaactaaaagaatatgtttaattgcatgctaagttctgtttaaattcaaagacgtcatacctgcttcatagtataattaaaagtatagtcattcctgccatggatttcccacacgataaagtttgcatcaactaatttaacaaagccattttcatcaaatctgaaacaacaaacacaaaagtaagtttagtgccaaatagagggcctgcagcttttgggtcagatgggtttaggtttaaatcctttttgtttgcttggtttttgagatagggtctcatatagcccatgtaggcctcaagcttacagtgtagtgaaggatgaccttgaactcgtggtcctctctctccacttcccaagtgctgggatcacaagcatgtgccattcattcagagtggtcaaatcctgtctttatcacttattagctttgtgatcttggggaaattactggaactcatcatctcttacaagtatttggggggggggggacaaaggctgggcgttgttggcacacgcctttaatcccagcgctcgggaggcagaggcaggcggatctctgtgagttcgaggccagcctggtctccagagtgagtaccaggataggctccaaagctacacagagaaaccctgtctcgaaaacaaacaaacaaacaaacaaacaaacaaaaaacccaagtatttgtgacataattgtatctaatgcctgtgttattttccccaactgagtgaataaaagagctttgttttgagaaaggaatttaagtagcccacactcatcttgaaccttcaagttcactgtgtagctgaggatggccttgaactcctgagcccactgccttccacccaagccctctcccctatttctccaaaccctgctgcttttcagaaagctcgccaaatgatgccgagcatcaaatggtcttgagcatctcttggcgatgctcaagaccactcccacagggtatttaaactgcctcccagaaaatagactcatggttttttcgatctccctttcccttctcctctctgtggcgttttctaatttggtttgatttggattactgcattggtggagaggcttattgggatatacttttcacttactgctcatgtttctgagtgaaattgtccccatatattcaatgggtggaaattactcagactttagtgtccagttctttcttcttgcactgtaatcccgcttttaaaatacaatttatcatttgtcagctgtgttgatttaccaaaaatactaggtccttggcagtgtctctttgttctctgcccagatctctgcttcacttcaaagctgttcaacctgggtttcaggttggttgaggttttcggcaacccaacactgactagcccaattggttattgtcccattcttacaaagtgcagggggacaggcagggagtgtggggggcgggggtggagagggaggagagcacttcgtgttacaaagcagtacttgggaagccatttttgtttctgtatttactagttttgagaaaccataaagagcttcgaagcttagttcccaaacaggaacgatggagagcagctgcttggtgtctgggctggggagcatcacagaaaaacgaaaacctcacgcgagtgctttggctccttgccacagaaaaatgcaaggacactcagaaggagccgagctcaaaagctagcagttttggtggaagcaggagtttgattatacccgtgtaagtggcagaattcttgatttcctaagaattaggggctgatgagatgaaatggctgatcaggccattgctacagagcctgatgccctgagtctgatccctggaaccactaagtggaaggagagaactggctctgacacctgacgctccccccccccccgcacaaaaaaatgttaagtttttttttgtttgtttgtttcgtttttagaattagttgcaaagttgtgttttgctcaaggacaaaaagatgtcctcggcgccaggacagttaatgcaaagagccacagtgccatcttgtgtaacaagcctgcattgcgtgagccatcgtttcgcagttttgcttcattgtgactatgtgagagacttgcttacatgagcttgcttatttttaataaattttcattagcgtggaatagaattctaattaaatctgagaatgaaggcaatgtcactaattggcagctacattcctaatagttggtaatttttctatggaaatttgacttcaggaattgaagagacctcattactggtcttcaaattctaaacttgggggatgatccattctattaagtaggtcttttattatctgtgtttagaggagcataaaagctggacagaggggcattgggagagagccagggaagagtcggtggtcatgtacacagtagctgcagttcaagcaagaaggtccttttggctattcctttcttcagtgagtgcaagtctgcagggagacctagcaaagagggtgctatggctgatattggttgtcactttgccagcatctagactcatctgggcacatctgggagggattagctagtttaggttaatctccaagcatggctgtgaaggatttttttgccactctgaaggtgggcagtgtcttccagcagctgtccagatgtacagaggtccaaggagaaatcttttacctttcacctctttgcccttttgtcttggtgttgtgttcattgatcctgtttgctctaccagcaatagtcttactttgctgaagtcagaactctgcttcgggctggagatatggctcaaagttaagagcactggctgctcatccagaggtcctgagttcaattcccagcaacctcatggtggtttgcaaccatctggtgccctcttctggcatgcaggcataaatgcaggcagaacactgtatacataatgaataaataaatcttcaaaaaacaaaacaaaacaaacttctttagccttgcaatgtggaccaaagtctcctggactgtgtggcttctagattcttccatgtgaagacagccattgcaggactaccctggtcttaacttgtaagccagtctaataatgccctttttaatatacattcattctatgtgttctgttcctcagaggactctaatagagaggggagagatgatttgggagacagaggggaaactctcaggaacaatgttcttaagtagtagataggctttagacagcacctatgctgtgctggctagtttttatgttaaattttggcacagacaaggttcatttgggaagagcgaggctcagtcggggaaatggagcaaccagattggtttgcaggcaagcctatagcacattttcttgattgatgattgatgtaggatggcccagctctttgtgggcagtgccagccctggtctgatggtcctgggttgctataaaaaagcaggctgagcaagtcaggaggagaaggcagtaagcagaacccctccatggtctctgcatcagctcctgctctaggttcctgccctgcttgagttcctgttttcccttctctgagtaatgaactacaaactgtgtgctgaaacaaaccttttcttccccaagtcatgatgtttcctcacaacactatacatcctaagacacagggtggctatgagtgcaagatacagatgcttaaaggtgtacagaagtgttgtcaacattgggttgatgtcaccttgacccattcactgtcttcctctccctcacctctcacatatccatcatcaactctttctggttataatcatatttatataatctataatttacatcatagatgaacttcttggtccatggtaccttttcagtcattccccacctcctaaatttaattttactaacaggtctccctacttggacttctttccctagaattcagagagactcaactaaaacactcactcactcacatgactcttctggaacaagggaacgaaagccttgcatgatctggactctgcaggacagcttccctaccccttctgctgatgctttcacttctatgtttataccttgtcttcctcaaagcaccactcttgcttgaaaggcttacccactggaattcattgacacccttccccctctccaccttccctttggattcagctaagtatttattatcctttaaggatccagtacaggattcagaataactcccagagcctatcactcctcatagggagtggagtcttttcttttgagttccaatatctactgcccctttcatccctgtctataactcaacttggcatatcagctcttgggtctatctaggccatcctttgagggtagagatcctgcccgtgaccttggattcctagttcatggcacagtacttgaggagtatttggtatggtagttggcggagagtgggcattgaatgatgatgatctgaattgaagagaatgctttattgggagagaacatgcttttaaacatatgcttgttgtccttttgtttttactcctggaaaaataagcattataaaacaaggaaacagacacaaaactaggtctcagtagggtgcccaggaagactagacggtgaataggagagaggattagggccgtgtacagtgaattttgatgagcgattgtagcttcatgatgtaggtgggagaggacgtgatgtaggtaagaagggcactgggaggggaaggagggcaagcagcaaagcatgctagcagaagccttctggaccccggcaggaaatctcaaggtaccaggccaccactactgccctctccacccgagagaagccaagcccttctcagcccaagtcatcccctaagtctgcagaatagagcatcagatcccctagacatggagttacaggtggttgtgaggcactgtggatactgcgaactgaacttaggccctctgttgcagcagaatgcattcttaacaactgagtcatttctccagcacacatattaatctcctaagtgggtataaacttacagctctattattggatgaaacatctggtggaattcaagtctcttggggcagccatattttcccacatcataccttattttctagaaaaagaaaaatgctttagttgttgtgttcatttatcacattgacagaaagtaagcttttcttaccaagttttcaggtgggctatctctcaggaactccctgtggaaaaaagacacctgtcatctacttattcttcctccattcctcttaaaaactaaaggcatagtgtacttaggttggcatcacaaaagccaagtagagaaacaggattatgaactaccaagtgcttcacatatcttttgccatgtctgtgaatatagtttcagaccaaccaacaaccaagcaggtacaggccattgtcctttatttggaaacatggaactgttttcagaaatcgtatgaaaacttaatcaacactgcaaactttgcttcattaatgagaaggatgcatggttggaaagtctgtattcactgtgttattcaacactgtgttccccagaacattacagtcctagtcactcttctttactgtgaagagacaccatgaccaaggcaagacttattttttttaaagcatttaactgggggcttgataacaatttcagagggttagtccatgaacatcatggtgggagcagacaggcatggtgctggagaagtagcttagagttttatattctgatccacaggcaggggagagagagagggtcattctcactaaaatcaccgcaattactaaatgaaagagtcagaaacaacatattttgtttttaaagacaagatctcatgatgtccaggctgtcttcaaactcattgatcctcttgtctccaccttgcaaatgctgcagttatagatgtgtgtcccatgtcttattcgtgtatgtgttttgtcatgcctgacaagtactcaaccactgaaacacatgcctatctttaaatgtgtattttaattgattaattgacttaagtgttgtacatgtatgatgtttgtgagtgtgtacatacacatttctatgaatgcaggcacatatatactatggcatgcatacagaggtcaaaggacaacctctggtgttggaccacgctttctacattgcttgtgacagggtctttttgctgtttaccactgagtatgccagtctagttggtctgcaagagtcttttgtttcctttcccaatctcactgtaggtgccctgggatttcaggtagatataactgtgcctggaattccataggtttggagggacgttatttactgaaccatctctctagcatccaaaagtgtatttaaaactcccagtaattccctaatttcaattttttcctataatggaatcttcctcctctgtgaacacaagagacatctgtaagttctaactaggtcgttgcacagtcatatagaaaggtgaggtgggaaataaatactcttgcattccccccctttttttttagaaatttctttttatctatctatctatctatctatctatctatctatctatctatctatctatctatctatttaattatacatatagtattctgcctgcatgtatgtctgcaggccagaagatggcaccagatctcattatagatggttgtgagccaccatgtggttgttgagaattgaactcaggaccttcggaagagcagtcagtgcttttaacctctgagccatctctccagccctactcttgtattccttaaatgataaggaacaacataggatttgtgactaaatgacacttgctttgttcattgaattgaaccagagagggcaatgataagtgtttttgtaatgtttcagataaggttaagggttgtatctccagcttcttttaaatttgcaaactgtcaagctaaatacatgcatgccaatggtatttcaaccactaagtactagctgattataaactactagctgtacattaatatgtttatgctaaaaatatttcttacttgtcaatcacataagaaaaatcacggcgctgacatccagttgtagtaaatctacaaaaataaaacgtaatgtagttgtaaggtcattcctcatacatgtatcattaaacccagtggttcttaaactggagattgttatggaatttgtttactaaattaaagtctctgcgatcagctcccagccttagtttagcatttctatttttaaaaaatcagtttcaaacttgtggtgatatattctttatgatctaacaaatatagcctgcctgaagattagagtgcaaagatagccacactagttagccatagaggccaggcagtggtggctcacacttttaatcccagcacttgggagacagagacagacggatctctgttaattcaaggccaccctgagctacacgaaattgatccagtctaaaagagaaacagagctcacacaaaggtgatcctagcacttaggatcccacacctttagtcccagcactagagaagaatctaaggtgggaggagacaggagctcaggcattctgaggtttggcagagacagaggcaatctgagtacaggatctccctttatttgttagatcttaaacaaaatatcaccacacaaacttttctgatttacctcctactttgtacacactgccacctcacacaggaaagaaatcacagcaggttgttgtcttcattaagtcctggacctcagacagacaaacttatgcatgaacacatactctactgtgtggaagacagctttacagatgggtagcgccaacagtgtgcctcatcttgtggttgaagaaagtcacactgtgggatgctctcagggaaccgttggcggttctatttggttataataaaaaaccagggaaagcagtgcaggacgtggaggactctctagtataggtgtagacaactctcagacgggggaattgaacgtggtataagtaggatagagagtagggggaatggcttctccctcttatttcctgggactgcacagcagactgctaagcaatagcaaaaatagagactggcttgttatgagggaaagtggctgccttagttagggtttctattgctgtacagagacaacatgactatggcaactctgataaagggaaacatttaattgggcagcttacagttcaatggctaagtctattgtcgtcgtggtgggacatggcagcatgtaggcagacctggtgctggagaaggagctgagagttttacatcctgatctgcagacaaccagaaatgaactgagatatcgggcgtggcttgaacatatatgagagttcaaagcccaccccaacagtgacacacttctccaacaaggccacacctacttcaaaaaggccacacctcctaacagtgccactccctatgagcatatggggaaccaattacattcagactaccacagtgacaatgaaagaaatgctgcctcctagtgggactgaaacaatatgtgacttgacaataatttcgaaccagagtctagagaattggctcagtggttaagagcactggctgctcttacagaagacctaggtttgatttgcagcacgcccttggtggcttacaaccatccgtaactctagttgtaggggacctggtgcgctcttctggactcttagagcactaggcatgcatgtaaagtacaaatatatatgcaggtaaaacacttgtacacataaaatattcaaaccatcagaagctggacaccaattctagttcgactttagatttcatcatgagcatgccagttagaggctggtgttttcaacctgtgattaccactccatgcaccatttgttttaaaacttagagtaagacccaacacatggaagcgatatacttaccctttaacttgaatgtatttatttgagtcacatccaacagcaacttcaaacacctaaaagtgaagtaattttacaaagtgaattgagcagctctgactcacacaacccaagctagctttagagccaaacacaattacattttacattagaaacacagaatgaatatcctttatctgtaactcatggcaccagaagtgtcccagattttagagtatttgcataaacctaatgagatattcgggggtgagccccagtggatctcatcttccacctccaccactgcagccctatcaacttcatgcttgcagctggtgctgtagattctgccagcaggcatctgtaatgtacttgattcaggcagtaatttatcagggaatttaatagccttgcatgcagcggcttttcttgcttctctagttctggtttacacactgctagtctgtattcaaaggagtaacaggtcaactgctgataggccacatactaggcctatggatatttgttctaaacaccctaacctcacctgagtgatatcctactgtttccttccacggctgtgattccaggccgccaagtgtttccacattcccagtgtgtatatgaactattgcgggtaaggtcgcctagcagccagcacagtgtctgccagacttcgagaggctttggtgacacagctcatgcttactgggagaaactcttgggttcagtgggaaaagcagcagtgacatcatacagacactccgcatggaaaagggcaacattaaaaggaccacataaaactcccctgcaagagagacccaatctcaatatggaaggtagagtgcactaaggatgacatctgacatcaatcaaccctgggcctccacagttgtgaacacacaaacacatgtgtacacacatgtacacatgcacatacaccacagatgtacatgcatacaaaaatctgttgcagtctgatgtgatgtgtgtaagatatatatgtatatatatttatccccattttttttgaatatagagtctttttacattgtccaggctctccctgacctcttgaactcaatccttttgctttttgcctggccctgatttgataaatataggtttttttgctcccaaatcccaccactgttgaaaagatcaaatgcttttccaggtaggacatggtagaataatgactatgttaaaataaaaagagtctttgtttcattttgcttttcatacctggtagccaaatgcattgcacctaatgttcaaagaaggttaacgtcatcaaatttctaccattaagaagaactcttggccaaagctttactccgactgtcaatgcttagaaataggttgcttaaaaagtacacactgatgggggaggtccttctgtgtgtatgtttgtcttattagttgataaataaagtactgttggcaaataggaaagcaagttaggtgggactaggagtcaaggaggattctgggaaatgtagtaaaaagaagtcttgtgatacaggcaggaagtgacatagcaggccgactcatatataaacagagacaaacaggaagttgtccctctttctcttgctcttcctcctgctctctgtggagccaccatgtgagccctggaagacaggacaccttccgcaggcgtcatccataagataagtcttatgattatggttgataattaagactgagctagcatataagaaatccagtcaattggccagcagcatttgtaatataagactctacatgttattctgggcatccacatgggggtggggctcaggcggatggagtaaagacctatcataacaacacacagcttaggtaggactaaaacaatggatcagcctttaagctttagaaggcagccaggtttacatagatttaaaaaagaaagaaaaaaatagcagataaccactttccaccttgtagaattgcccaggtttctgtcagagccaagggcctggttctctctcccctgccttgtaagccatggcctttagggcctcttgtcagaggcgaactcaacagggaacgttcttagatcccattgctagccatctgatctcatccacaggatgcggtttcttttcccagacttgcatctcttattacctatagtcgttctatcttttctttcctttgaaatacacccagaagctcagccctgccttttctgtgtattaagcagtccatcaaagggtggatgcacatctcaactctatcgtcaggacaaatggtgtctatttgtactaccccattctcatcctgatatgagctgtcaaaaatcacaagtcccagaaccagtgaccacagctaggattagaaatatgagttgtcttgtaggtggacctggaaaaggagctatccaaagaggaagcctgctttctaaggaaactatagctgcacgttaggcccatggccttctgcttccaaaacaaaggatggctatcttccccgtgaaacattgcaacatgagaagtagaggggagaggatgggaagacaatatatagcttgctagccatacatttttagcatgtgtataggtgtgtggtgtgcttgtgtgcgcccatctgtgtgtaggtacatatgtgtataggtgaatatgcatatgtatacttatgtgtagaagccttagataggtttcaggagtcatcctcaactgctctccaccttattctttgagacaaagtctctctgttgaactcagaactcactgacatgacttgtctatccaactggcttgctctggggatgccctgactccaccatccaagtgctggaattacatacaagtggactgccctagccacccagagtttacgtgagttctgaaactcaaaactcaagtcctaaagcttgtgtggcccgtttgctttatccactgacacaccttccagtttttgaagacaagtagttgatctccaaaccacgtcacccacctgtctggcgattggacatgtttttgaaaattcactaggtcggaattgaataagcatgagacccatgttcttctccctaggaaaaacaatccacacaggttactgtaggatcacaacaacaggagacagacaggaatgcattttcatgtagagcaaatgtgaagtcctattacacgtggggctggaaaggcctggatggtggccacttccgtgaaggcaactcttcactatggtgatgtctgtggcagctccagtactgcaccccatcatgggcccctccctgctcctttggatcccatgcatcaacaatattgttggcacagcaggaaacagtagtgagcatggtccttcccactccctttataaatacccttagtgcctggacactgagggtctgcaccatcgtgatgccttgacctgctctctcctgaacacactcttcctttctctctatggagttcccaccccactggcaacacctttgaaacaatgaagagcaagccacctcctaatctcattaagttgcataattgatttgatttgaactcaaagaaagatcagatataatgcctttcttagttaccatgtgtacacagatcattttgtgtttgggcaaaatagaggtttcaaaaacaacggaaacagaacatttgaaagcttgattcagactctacttcctgataagattttacttttttgggaggggatcatgagggaaaaaatatcttagataattctatgtgtggtctacaatataattctcagtaaatatccataaaaacaaaaatattgaaaggaacctatactgttggtaggtgtgtttgttactttttattgttgttgttgttgttgctatgataaaatgccctgacaagagccacttaagggaaggagagtctatgtgagttcacagttcataggtagagtttatcttgatgaggaagtcaagtcagcaagaagtaggaacagcagattgtcgcagtcagggaacagagatgggtaaatgcttgtgtatggtgtacttttctgtacttttctgttttacattccaggtgtcttagttaggctcactattgctgtgataaaacaccatgaccaaagcaacttggggagaagtggatttatttgacttatgtttccatatcacagttcatcatcaaaggaagccaggataggaactcaaatagggaaagaatctggagtcaggaactgatgcagagaccacggaggagtgctgcttactgacttggttcctcatggcttgcttagcaggttttcttatagaaatcaggaccatccacgtgggctgggccttcccccatcactaattaagaaattgccctatagctgcatctcatggaggcattttctcaattgaggttgcctcctttcagatgactatagcttatgtcaagttgacacaaaattagccatcactccatggaatggtcccactcacaatggtctggtcttctgcctcagctaatcatgacgatccccataggcatgttcagagaccatctcccagataaactagatctcatcaactgacatctgagattagccatccctccaagccagagcggaaaggcagagggtgaagaagaaagaaaaggtgataatgcctcttctgactactgtgtgcaaggaacattttcttccttctcttcctaagtcactgctccacctgttcgttggtttttctttcttctttgtgctgtgtgtgtgtacatgcagatgtgtactcatgtatgtgctagtaggggcctgaggatgacatcggatatctttcttgatcagtgtccaccttagtttttgagacaagctctcttattgaaccaggactagacttgctgaccaatgggctccagggatcatcccacatctccttgccaccagtgctggggtttcagacatgtggcactatgcctagcttttacatgggtgcaggagatccaaattcaggtcttcatgcttatgtggcaggcacttttctgcctgagccacctccccagtcccctgttttattaacaacactcatcagcacttgggattatttaatttacttaattgattggcatttgtcttttcccactggaaataggttctaatatgccggtactcagtctttctattcacacttaaagactttctctaatatgaaaacttcttccttttgattaaggataacatgtagagactttgagttaggaattaatgataaaacatgcatgaaaattcttgaattaataagtggatgttttggtttagataataatgacttaaaggttcacatgtggcatagtccccagaatagcaccatcaggagacaatggaccttaagggggtgatgtccttgaaggggattgttgaccttggtttcttcctccttgttacctggctcatgggatctgtcacctggctcatgggatccatcacctggtcttgctctgatgctactgacttgccacacttccagaaacaattcggcctctgagacatgaactcaaaacttcaaaataacccctttcttctttgaacttctccttcaggtgttccatgacagttgcaaagcaagctaagatgtggcaatcttttgtcatctttggcagtgtgaaggagaaccttcagctcacttcccactgaattacaaggagtatttgcattttaaaggctgaatattcgtttcacttatatctagtcatacaaaagaatttgaaatttgggggccggagagatggctcagcggttaagagcactgactgctcttccagaggtcctgagttcaattcccggcaaccacatggcggctcacaaccaccttgaatgagatctggtgccctctgctggcatgcaggccgaagactgtatacatgataaataaataaaaccttaaaaaaaaaagaatttgaaaaatttgaaatttggacatctgaaagggcatgaattcatttaaatgaaagaaaacatacacatcaggaactcaagtaacatatttaaaagtcagacttactctagcttgaagtaatcatctactaattcataatttgttgtctgataaaatgttgttagctgaaaaagaagattgaaaagtttctgtagagcagaaaacgtgcaaatgaggcctcaaattagtatcatttaggtttgtacatctagatcccctagaacaggtcacagtgttcatcactgaaaaccacgtctagatatgctataataggttatggtgtttgtcactgaaacccaagtttctctaagacacattgtatacttttagacattcaaaaatgtaagtaagagaaataataaacttatttatgtatttatgcatacattttgtgtgtgtgtgtgtgagagagagagagagagaaagagagagaggagagagagagagtgtgtgtgtgtgtgtgtgagagagtgtgtgtgagagagtgtgtgtgtgagagagagagagtgtgtgtgtgtgtgtgagagagagatgtgtagggtctgcatgaccactgcacacaggtaaaggtcagagggcaaggtgcaggagttggttctctccttccatataggttctgaggatcaaagtcacatcaccaggcttggtgacaaataagtttacaagctcagctattactgacccccttttatttcttccagattctgctcttattattgtactttgttacattttttacgtgtgtgtgtgtgtgtgtgtgtgtgtgtgtgcgcgcacacgtgcgtgcgcccatgtgttccttgttgaagccagagaacaacctcagatgttgttcctcaggcaccatctgtattctttagaagaaaaaacaaacatttttttttaagattctatcttatgtgtatttgcctgcatgtagtatgcaggtatgtatgtatgtatgtatgtatgtatgtatgtatgtatgtatgtatgtatgcatgccacatgcataaagttccctctgagacagacaagggcatcagaccccctggaactggagttatagatggttgtgagttatcatatgagtgccaggaatggtacctggggtctcttaaccactgagtcatatctccagattgcccctccctcttgaggcaggagctgtcactgacatggagcttaccaagtaggccaggctgactggtggtgagctgtgggtagggatctgtctgtctctaagaacaatatgctggggtttaaagcatgtgctacctttttttttcctggttccttaattcctgagctcggaagaccatgatgtaattttgccttctaatgctcgtctctgaaccatctcacacatcttcgcttcagtttactgcacatagaatattttgcagaaccctttgttctgtttgagtgtttttaaaaatgttcacctgccttgtgaatatgctcttctgtaatttcagtctcccacatttcctgtagtgtgttattgcatattgataattagtatattttaatgtttaacagcacattatataatgtaatagcatatgataatatgttgtatattaataatactgcatactactaaaatacaatatacaataatatattcttgatatatatatatatatatatatatatatatatatatatatatattgtagtagatggcttggaaagatggttgagataactatgcatactcttgtgtacataaccctctgtagtgtaacacagcttgcttgtctatttcctcaggtagtagacccttccagaggaacaacagatttattagagtgacttacatgatgtaggccgggtagtctaacagtggctgtactcaagaccctgcagcctggcagctacttctaaagtttttgattgccctacatgatgtggtctagatagtcctaggcttagtctaggaggttggctgtctcagcggccccagtctggtgctaaaagcctgcgggtttcctggagaactgctggttttcattccatgttggaaggccaaagaatttgggttctgatatcaccaataacagcggtggcagcggtgacagtggcagcagcagaaactggctaggtaaacgcctcagtgtgagccaaggcaagcaggcagaagcaaaagatttttcttctgacttgcttacatctgggctgaagcccagatgccacatacaattcaggctttccatttcaatgaacctattcaagaaagcctctcacaagcatgcccaggagctaacctaatctagatcatttctcacaggtgtgcagagactggtggacctgttccccctgggggggactagcctatctgtttagtgatgtgaccccccctcaaaaaagaagctaatgtttttatatttattcaaaccaaataaagaaataaaaaatactaacttaccacacttttagtagagaatccagaggcaatctcataggtgatcttttgtgtccaggttaatatctttggaccatagtgctctacaataatatagagacccatattttctgggtagactatttgagtccaaactgtcagtgcttctcctttgtccataaaataaaaatcactaagaatattgtgttgaaatgccatgtatgggcatttgtcattggttttgtgaattacactttgtagctccagatataagggatattcctgtggctgcaacaagaatgtttcactaaaatataccaaatatacttgataagatttgttaaagaaaagtgctgactttattgtactgtttgcccatgcatgtagcttaattgcatctataatgccagccttggaaaagaacattacattattttccatttttatcaaaatactcccaaaatgatctggaaaagagagagaaaaatgttggttatttaattttttaatgcttatttgtgtgtgtgtgtgtgtgtgtgtgtgtgtgtgtgtgtgtgagcgtgtgtacatgcatatgctataactcacatttggaaatcagaggacaatctatgaagtttggttctccctttctaccttgttgtttctggggatcaagctcagattatcaggcttggcatcaaacacttttgcctgctgagccctctcactggcccaggtttgtgctattttaagtaattataaatcatgttttttttgaagtatactttaataaaataatctcttgggttggagagatggctcaatggttaagagcactggctgctcttccagaggtcctgagttaaatttccagcaaccacatggtggctcacaaccatctataatgagatctggtgtcctcttctggcatgtaggcatatattcaggcaggatagtatatacatgataaataaataaatctttagaaagaatttcttgtataatgactatgtattgtgaaaaaattaaagtgaacaagcatgaacctttgcactcatttgaggactgcttaatttctgagtatatttctcttcgtattcaccatgcctcttttatatatcatataatacactaagtgttttaagtaaaatatggcaaggacaggctatcagggaggatggtattccagtcagatatgtgttttcttcaaattcatatcctggagccttcttcatccccattgtaactacagtggagaacagagcctttaaggaagtaattatagttaaatgaggtcataagcataggacttagtgggactggcatcgttgaaagaagaggaatacacgcctcagagagatctctctccctctacacacacacacacacacacacacacacacacacacacacacacactcactcttgtgaggacagtgaataggagactgctcactggaattcattcctgatggtgccttgatcttggactggaagaaatgtgaggaaatttatgtgtcttgtttaaagcactcagccaatgtgtgtgggtcatcttaggggagtaatgcattccttattggataagaaatgaacagctttcacaccttaacagggtactttgcctaaaaccgcacaggtcttaggcaacactcagagacaactggttagaagcaggggggtggacatgtggatgccagggtgcatgatgcccagtttgcaagcagagtaaatcactcactcaaaaattaccataaatagtatactaatcaaattttcatagtcagacatgtatgcagtggatccaaaagtggaagaggaaaatgtatgtgaggaatgacacaatagatctttttggtgaatgattaagcgattgtaggatacatatggtaaaaatctgcatacaagcaaagacctgttctaacaaaacagtgggtgtgctggagagatggcttagtgggtgaaggctcctaccaacaaaccggatgacctgagtttggtcctgagagccagcttctgcaagttgttctctgatccccacatgtacatccccctcccatgattaaaaccggaaaaataggctgtcttaggacaaccttaggtgtccattctcatcttccactttgcttgagatattttagcttttgttgttcattactgtatataccaggctaactggctcatgagtttctggagctattcctgtctctatctcctatcttgccatagaaacattgaaattacagatatgtacttctgtttctggctttgcatgggttctggggttatgaacgcaggtcttaatgcaagtgctttacttggtcctcatttatagtgtttagtgaagacaaagaagggtaagaataaattagctgatcgcatcacttaagcagagacaggccaccaaagttatagaggacgtggaggtaaagggactgttcgtgacaaaaggttgaaaggagggaactaaataaaatgagaaactttgattaataaaattgagttcttttcaaaaggggaaaacaaatagtaacaacgttttgcaacaagagagaggaggggtctcaacaaaattaagatgacaaatgacatatttccataggaagaagttctgttcccagcacttgtggcatgggcaattcacaactgcctgtaattccagctccagatgacccttctctggcatcccaggttcctgcactcatgagctcatacctccaacacacccactcacacatatacataattaaaacaaaataaaaataaatcttaagccttgcatgtaacattccagggcttctctagcctgtacctccaatcttccaaattatccctacaaattagtctttgaggcttaagaactactgtcaagtctggctacagcaatgactgtatccatctggtaccatttttgtttggtttggttagtcacattcttattattgaaagaaacagtgtagaaggagggatgatttgttttgtcttactggttgagggtggggcttccagtgagctgactctcttactttgggactgagtagaggctcaacatcacgccagcaagagtgcatggagcagcagctagggagcggggagtgcttgcaccagctaggaagcggggagtgcttgcactggacggctttctcctcttcacctcttttatttcattcgggactccagcctaaggggttgtatggtgacattcagggcaggctcgcccacctcctttagtctgtcccttctggaaatgctctcacatacatacattttagaggcgcatttcacaaatctccttaggcacctctcagtataaatatcacagacatgtgagatttggaacacctgctgctcatccacataaatgtgtcaggaaggcagctggaaataggagcagagagatcaggcttcggatcctggatgcagggcaaacaaaccacaaggttcaacggagctcaggagtcaataagacacaatcagggatgcttggctattccaaagttacgatgctgagggttaacagcagagcagcagcaacaacaaaaaccaaacagctggggggcagaagcaggaaggaggaggaagaggggtagggttgagggtgggagaagaggttccctagaagccaaatgaaaaaggcattttcaggaaaggcccaaagattatgccaaattgtttcaaatgccacccgaagatcattcaaggtgactgaaaactgatctctgagttaacagggctgacaagttgaaagtctgctaagcaaggattcaaaggggagagtgaggagacggagaaagagcatgatgctagacaacacattcttggaatacatgacagaagaaaattgaaatgctgtgaggtaagtggtagcatggggtcaagaaagagtgattgcaaatttcgatatacaagtccatttaaccatatgattgaaaggctgaatggcttgtttgtgaagtagcatatagatctatagaaactgacattggggtttggggattaagctcagtcattggtagagcgctttcctggcaagctcaaggccttgagggaaaaataaaataaagtacacaaacctacattgatttatgggttgaattatgtgcatccaaaaagaaatgctgaagttttaattcccaggaccaaacacttcagaatatgatttttaaaaaatgtagtcagatatagctgccccctaatccactatggctgattatgtgtgtgtgtgtgtgtgtgtgtgtgtgtgtgtgtgtgtgtgtgtgtgtgtgtgtaacaaaggtcagaagacaaccctcagctgtcagagctctccttcatactttgtctgaggcagggtctctccaccagttataaactaggctagctggctcccagcctcctatctcccatgggtgtgctgggattataaatactgtgctactctactcagccctggggatctgaactcggatcaacgggtcaatgggtttgtgcagtgagagcttttacacatggagtcatcatctccttgcctgggttatgtctttttaaaaggtaggacatgaaaacagaggcacacatgaagagcacaggaggagacactggactgataggtgtgtgagacaagtaaaagcaaaaacaaaacaacaacaaaataaaacccaaagaacaaaaacaacccccccaccccagtagtcaagggcaaacaccactctaccccaccaatgccaggctgcaaagaaacactggtgccttgacctctggctcctggctagcttgtaggaggacacctcaaggtacttagttgtgtgagccttaggaacgttgaacagtataaggcttccagaggcaggcagatctctgagagtttgaggccagcctggtctacaaagtgagttccaggacagccagagctgttacacagagaaaccctgtcttgaaagacaaaagaaaacaaaatcagcaccacacctcttactttgacaaatatacacactgcttccttaaagcatctgccaaccaagtgaaacggactttttgagtttgccaaatggaatcatgtttttttttgtttttttttgttttttttgttttttttttttttgatttttcgagacagggtttctctgtgtagctttggagcctatcctggcactagctctggagaccaggccgtcctggaactcacagagatccacctgcctctgcctcccgagtgctgggattaaagacgtgcgccaccaacgcctggcgggttcatggtttaacactggtcaaatttaaaatcttttaagctgtaggtgctaaaaatataccagtagccatcaaaagcaccacatattgggacatgtacgatctccctatcatcaatataatgaaacccacaatacttttaacagtgctgagaaatcctcacctataatgacgttgtggattttgctgccttgtgataactttgacaggtttctctctcctgtctctgttcttataattccagtaatggtgaagtttttgtaataatagtaaaccgtgtgggcatcccacaggattaaatctggcagtgctgagtagaggaaatatgggactaagttgctgtcgacgggcagcgctagttggaagtcctggaacgcccaatttcctgaatcctcgttgtacagcagcatgcggacgcttttggtggtggtgcagggggcacagtagtacactaccagggcaagttccagagggtgccacgtgtactccacactttctatcaccacggtggctgccgggctgagctttagagctgctttcaacattgaactatctattactttcatgaatctaaacgcagaaaatccaaggtagaattcactttttgtccatattgccaatatgctttttcttttttcagactagaaaaggaaaaaaaaaaaagaaagaaaaatcttcagtgatagacagtggtctagccatttctgtcttctatttttcctacacttgacagtgaagagtcgaggctgggagggcaggtctaagcagcacagatggttcccaagatcctgggttacattcccagcaccaaaagtaataaaatggaaaggaagtaattaccgagttttcttttagcattattttaggatatagaattttaggcattgaagtcaattaaataaaaaaaagtcattatatatcatgaaaagaaagaattccattaatttttcttatatttctagcagtagaaagaataaataatattttctttcacacttttaaatacaccatcctttctttgcttacttatttatcactcttgcccagcatggtggtatatacctgtaatcccagaagttaggattgagggaggcagattttgagtttgaggccagtctggactacatagtgagaccttgtctcaataacaaacacaaatatcccatgaagcaaaaaacaacagtagaaatatttgtttcgatttttattattttacacctttatctatgtgtatctataacaccaggctacttaaagtgtaatattgacagtgtgttatgatatttattctgattatttagaagtaaaatatgagaccatacaaaggatttgggtataactacaaagacacagtcataaggtcctacattgtttaaaattaaactctgataacataaagatagttattataagactcaacatagccactaaaaatagtttcatttaaaaagtctatatgagacattaaaatgctaaaaaattttgcaatccatttagaacaaggcaagaatggagaaacaaaggaccaaagaactggtgggatagatagaaaacaaatgttgctgttgggaggtggtgaagggaccagctccccatttcggcagccataacagccaaacacgcacttgcctgaacttgttttggtcactaaggtcagatgcctgcccctttaggcagccataacagccaaacacgtgcttgtctgaccttgtcttagtcactaagaggttatacgcctgcctcgtggcaaggaaccaatcagaagttagctggtggtgctatgctttacagctctaggtgtgctttacggacaagtgcacagcaatgatgcgcagagcatagcaaccaccctgggagggcctatgggccataacaaccagttggccaatcaacacagggcaagccctccaagcctggaggcacaccaatcctgagcctgtgcttacccctagacactccccttacgctgtcctataagatctctatgcagatttttagagctgtctttcctagccatccgccatagtggatggatggaaggtccgagctaacatggggttagttcgttaaacaactataataaagccttgtgcagtttgcatcaagtttctgcctccgcatggtgattggggtggccgaggtcctgggctgagatcctggaagcctgagcttccggggggtggggggtgtggaggggtgtcttacagtggctcagtggtagaacgattgagaaggatgcaagagagcctaggttcaaccctgagtagaggggaaaagaaaccaaaatagtggtcttttattcctgcctaagtcttagtgtcttatgagtatatgctcacaggtgtttgggtgcccagagaggccaaacaaatacataggctctctcagtactcaatactgtaggcctttgatacctgctcattgtagatgctgggacccaaactctgatcctcctgaccgagcagcaagcactcttcaccactgagcaagctctccagcctcccaaacagtagtcttaacccatccatagcaaaagttaatactacatctaatagactctatcaaaggcagagactatcaccatggatttaaaaaaacccaacaacacaaaaagacacaacaggaggtggttaaaagaagaaagacatgagcaagaaacatataagagctaggggctgggtgtgaggacctgggttcaaggcctgcctggtccggcagatcgaattccaggacagggtccaaagccacagaaaaaccctgtctcatttgagcaagcagctaaaatatgtacatgtagctactgtttaaacaacccttggactttcgtccagggtggaaccaagggttccagaaatatgtctatttctgggcccgcacgtctgcttaccctatggttcaattcaagcaaccctcggactttcgtccagggcgggacttcagggtctcgaaatacatctatttccccctgaggtctgaattatacaaatacgagtacaaatcacgagtcctgcgcaggcacagatcaacaaaacagcaaattcaagtggcaccaaaccaacaaaaacaagcaaacatataacattgaacatataatttgcgagctcgaatcatcttacctccaagatggaatccactcaggtgaggggtggtcacaaatcgaggacgagcccccaaatgttagaccgccggaaaactcaagtacccggggtcccaggcaacgactgtggtcaccccaatcaccaggcggattcgagagcttgatgcaaactgcacgaggctttattgtaatttaacaagctaaccccatgttagctcccgtctttcacccacctgccatggcggatggctagcaaaagacggctcctagggcctcccaaaagatcttataggacagcgtaaggggaatgtctaggggtgtgcacaggctcaggattggtgtgcccccaggcttggagggcttgccctgtgttgattggtcaactggttgttatggcccataggccctcccaggctggttgctatgctctgggagtcattgctgtgcgcttttccgtaaagcacacccagggtcgtaaagcatagcgccaccagctaacttctgattggttccttgtcacaagacaggcatctgactttctagtgtctaggacaaggtcatagaagcacgtgttcggccgttatggctgccaaaatggaagctgttcccttcagaaccactacaaaaaaaaaaatctgctatagatattttgtaattactacaggttttaaaatcaatattgatattgatatataatagaaggtctctcttgtaagtaacccacataaatactgtaaattcaaactcctaagtgaccatgagttgactatttaggaaatccagagggaaacactttaaaaaatagttcttttatttttgagattataacataattgcaccattttccccttcccttttcttcctctaaatcctcccatctccccttctttctctctttcacatctgtgacctcttttctattaattgctgttacatgcaaatatgtgtatacatgtatattcttaaacataaccagcatttttaaagtaccctagggtttagaacatttactttttagatttatttatttagtttatcatttcatatgtatgagtgtttttgcacagatgtctgcacccatgtgcgtgcctaatgcctaaggaggtcgaaggagggtgttagaacccttgggactggagttacagatgttttggagcctagtaaaattccattagaggatttcttggggtccaagatccggtctgcattgtattgtagatgctagctgatttgctgttgaatggcatagcctcagtggagaatgtctcctagttttgcatctctacaaaactaagcatttgaatcggcctgcaccagagtggagaaaaaagtctatgtgaggacagatggtgaggaggtttcaggcagagaggtcaactggtggagagatggtagagagatctgctgttgggtctaggaagatgagacagaaatggcctcatggttagggaagcatggttagaaagcagccaggaagatgctaaataaaggagagactccagttttgcagcatggaactgaatgttctctaaagatgacaagatgcctgtgtctggtttatgaccattgggttgctaggaatttccaggtccacactcccccactcaggccaaacctcgtggcttctgtggtttggggctgagacacagatggttctgagctgccatgtgggtgctgagaatcaaactcaggtcctctgggagagcaatcggttctctttactgctaagccaactctccagtcctttctctttctgttatgaaagctgacataagtttagatgtgttaggggtcaatttgaaggtcattattttatgcaaaatgtttgttccagactccccctctttgctctgttctagggctttgcctcctggcatctgagctctgactgttggaggtcagccctgaggaaaggttaacatgttggaacaatttgcatcttcctctgagccagtctgttgggacagcttttttttcctcccagaatttctcttactgtggggatgtttcagggaggtggggtgggggcggtaggaggtggggatgggagtggtggtatgccccttgatttttgtcttcttgaaagaatgaattgagtcaagacacagcttaagtggaggctcattcctaaagcatcagtgtagccagacagagcaacccaaagagagagtagagtgggctgccccaaggtggggagcaacttgctgggttctgtgttgtggatttatgaaatgttttacaagtgtctatgaggtgggtgtcagagcatccaggacctcagtagagaatgttgtaggaaagtcccgtcccatctttgctaccaagaatagccacccctgctgtccaggattcaaggcaactggaactgtagtcacacatcattcagatctacccttcctggtcagcttggctatttcatacattttaatgttcaactcaagtacttgattttgctagaacatatttctttaggagcccaacaatgtagttaaaagaacatttacatttttgtgtaaaatttatgttttgtagtaagaatgctttgatatccattattcaaatattgtggtaatttgattaaattttgaaagcacacaggctcttgggggaacatatactgggaagcttttgtccccacagtatgactgcattgctctacatgacagagtacaagactgacttttttctttgtcactgggtatgcatctttactgctaatgaagggaccagctccccatttcggcagccataacagccgtgcttgtctgaccttgtcttagtcactaagaggtcagatgcctgcctcgtgacaaggaatcaatcagaagttagctggtggtgctatgctttacggctctggatgtgctttacggacaagtgcacagctatgaggcgcagagcatagcaaccaccctgggagggcctatgggccacaacaaccagttggccaatcaacacagggcaaaccctccaagcctggaggcacaccaatcctgagcctgtgcttacccctagacactcccctataagatctctatgcagacgctttgagctgtctttcctagccatccgccatggagggtggatgaaagactggagctaacatggggttagctcgttaaacaacaataaagcctcatgcagtttgcatcaagctttcaaatctgcctggtgattggggtggctgtggtcctgggctgagatcccggaggcctgagctttctgggggtcttacattaagagacctcagaaaacttgaatctgagaaatacagctgtttacctctttaaataactgtctatagacccatatgagcttgaacatgctgaatcttgtatgatcttagatggtaagtggggttagtacttgtcttggggaaacaataaccatgcaaaaaagctgcttagtagagcacctgatatattactgaataaacattatagtaatatatctaaatttacgttgataatgcacatactcacatatatcatctttcactaaccttaaataaatatctcatctgacaccatcgtcttctggtaatgccaataatttcagttgtaggaagacctttacttgagtccagttttgtaaatgttttctcggtttttaggtaaataacaccatttattagaaacataattccattgttgaataaggccacatcagtcacattgtgcctttcagcatcactcaggatacctggggggactcttattctggtccaggtacggaaggaatcatttgattggaaggtttcatagtcagtgaccaggacagtaaatgtagggttgcaggaaccccaggtagacagcaatggcctgccagccggcagggtgagtggtagatctccgctggtctcaggtatggtgggcctgggaaatgtcagcaggaacttgagatttgaaatgaagcaatcttggaaagccactttgtttcctctaacctctttcatcaaatcatctgaggacattggcaaattaatgtcccaggttctaaggagagaaaaaatgaaaaggagaagaaaaatgatctctcattcctctgattcatcttgcatagtttatgcattttaaaaaattctaagcttttatcaacataggctgccctggctccattttttatccttcattctggaagagaaaaatgatgttgacttgatgtcctttcttctgcaggtgtctttctaactccaaataaacagtctcgtctccctctttcctaacatggagttttgcacgtcacttcctgctttctggtgtggcaggtgaaggcacatcccttagcaatgcctttccttcttacctccagagctaactataccacacttactaaccgcgtcaacgagtccttctgcggctgttaatatagaaagcagacaataacaggtgttatgcaatggatgtagagaaacaggaagctttatgtgctactgaggaagatatggacagggcattgactttagaaccacatagtttagccattcctcaaaaaaaaaaatgtggaagataccatgtgactcagaagtcttgctcctgatatagatagatagatagatagatagatagatagatagaggagaaacaaaacacgttgtcaactgaaaatctgctcccagatgctcccagatgctcccagaagcatgatacacagcagctgcttatcgactttaaaccatgtgccgtgtttgtacagtagcggtgctggatggacaagtgtgaatggactcaactctctgaatcagtgtgaaccacaggttaaaatggtggattgtatggcatgtaagtcattgttccacaaagcttgttaaacataggaaagggctgggtagtggtggtgcacacctttaatcccagcacttgggaggcagtggcaggtggatctctgtgagtttgaggactctgcctggtctacagagtgagttccaggacagccaaggctacacagagaaaccctgttttgaaaaacaaaataaaacaaagcagaaacaaacaaacacaggaaaggaacatgttaccataatcttcccacccttctgcaacatcagaaaaggccttcagcttggttttaaagggatggtttctcctaccttcccagttataaaagcaggaaggatttgagtcctggcttattcctttgaagatctgagtggctcttcttactctatctattccttgcagttctccgcatctcttggaatttgttctctcaagtcctagtttaaaggctcttacacacatcacactccacccactctctgaagactccctgatttggtcacttaactttcaggaaagcactacctactccctctcctagaggcctgagtcaggcattgtgtctcaaggcagcctgggttcacctctgtgaggacatctctgtccccttgttgaagacagtaactatatcccttagtcacatgcaccttgcctgagcctgggtgcttaggaggttaaaacagcctatttataccttgtgatgctctaccatccttaattaacagaggttgcctttctggttagaatttgtggctaggaggacggctgtgttagaggacggctgtgttgacgagcactggggcaggtagtgaccgttacatccatcacactgctgtagcccactgtcatggctgagcaaggaacatttagggacaaaggcttttagactgagggttaggtttaaacaaacagtgatatcatcatccaaaaatctgactggtattttctgagttgatcatcagttggaattaacacaattttcccccctgtatcataaaggaattcttcccttggaaatcacatgtcagatacattttataaaagtccactaatgttttcaaatctctttcaaaagcttctgattttaagttaaagatgaatttaaaaattaaatacccggggaactggagaggtggctcagaggttaagagcactgactgctgttccaaaggtcctgagttcaattcccagcagccacatggtggctcacaaccatctgttatgagatctggtgccctcttctggtgtgcagatatacatggaagcagaatgttatatacataataaataaataaaatctttaaaaaaaattaaatacccgttcggacttaaggcacctggaacatagactcttctcttcactgttgtgtgaatggaaggttgctgtcccagggtgttcaacaacttggttagtattctggaattctgaaaaaaaaaagataaagcagataaagtttctttcttattattttcatagcctgatggggatgtcttctgcacatatgtttctcttgatgaataaaatactgtggccaatagggcagcaagataggcaggtctaggacatgagaaggattctgggaaatgtaggcagaaagcagtcatcacgtgatttctgggaagagaagacacaagtcaggcattctccagtaagataggaccaggtagaaatacttagatgaatagaaatgggttaataattaacacagagctagccaataagaagcgctagttataggccaagagtttcataattaatatagcgtctgtgtgtttatttgggggctccaagatgactgcaggactagtctagtaggaaagagttccctaaaaatagcccaagatatttggaagtactttcatgtgttggaacccagccctcatgaggtctctaagagttgttttccagcataaccacaggtacctcctgttttcctgacctcaccccactgggatcaatatcctgttgtgaaccatttgacctggggtttttgtaagtttgtatataaggctgctccacaataaaggtgggagacattctctcagaaaaggaccaggagtcttgtggttcatccaaatctccaggctttcgcccaatactcgaacttagtggccaagagcagccacattcgtgtattaatgatgtgttaaatttgctcttttagttaagatattgtttattcttaaacattcaacatactttcaagatttatttttgtctctttcaaccatctagcttcctctccataagaattttataaattataaatgtcacagaataggggtataattcagcaatacagtacttagtaagcctataaattaatataagccgtaataaaggttccaacacattgaaaacatttttgcactatcagaattctatgtgaatgaagactacagatatcctgaaatacagaaacctaagtttttaatatttcattttgtgtttttgttgtgggtaagaggtgcactttgccatggcacacatgagaaggtcacagggcattttgagggagtcagttctgtccttcctccacctgggttccagggattgaactcaggccattcaggcctggcagcaagaaactttacctgctggccaacttagtggtcccagaattgaaaaacaaacaaacaaacaaaaaaacaaaacaaaatctgtcagcatttaataaactagggtgaattaattaatacactgaagcatttcattgatgccagtacttccacttttttccctgctctactgaaggtcttcagaatttgaccttgaatcttttctctcctcgaagtacagtcttctagcctccacggtcacctgtactcacatgtgtaaaaaatgaactaactaaaaaaagaaaataaaagaaatggatgctatcaatagaaaggaaaacatccttcactgaagttaaaagcttttgtgcaccaaaggacagtatcaacaaggtaaaaagaccagctgggttatggtggcacacaccattattcccagcactcgggatgcaggggcaggtggatctctgtgagtctgaggccagcctgttctacagagtgagttccagggcagccaaggctatacagagaaaccccgtcttgaaaaactaaaccaaaccaaaacaaaaaacaacaataacaacaaaaaacccctccaaaccaacaacaagacccccaaaacaacaaaaaaataaaacccaatcaaccaaataaacaataaaaataaaaacaaggtaaaaaagataatctacagatgaaagaaaatatttttaaatcacatctggtgtatgatattaacattcagaatatgtaaggagctcagaaattccaaaagaacacgatcacaaatgaacaaagacttgaaaagacattttctccccaaagatgatcatgtaagtggtcaacagggacatgaagatggtcagtgtcaccagctgttatagaaatgcaaatcaagaccacactgatgctaggaatgtggcgcacacaccttcagtcccggcacccaggaggcaagggctggtggatctctgagttggaggtcagctggagctgtatagtgaggtcatgcctacaaaacaaagaagcaaacagcacagtgagctttccctgttgtgggatggctattcaagaaagcaaaacatcattgactccacaaaacccgcaaaatgtcggtgagggtatggaagaattggagccttttgtgaactgttggtagtaatatagggtggtgaaagtgctgagggaaacactgcaggtttctgaaaaaatttaaagcagaattaccagcatggctcacctagccccaaagtagaaacgagccaactgtcattgaaggacaaacaaaatgtgccatgtagtgcaatggactatatctcatccttaaaaaggaacaacaacaacaacaacaacagcaacaaaaagacagtaaatgaagatcttgtgccaagtgaagaaagtcagtcacaaaagaacaaatcttattcaaatcaaattctactaccatgcataatccacaagtcagggggaaagctaacaccagaaatgaaatctggatgttgaaccttggaaatgttagaaaataaatctgcttcttttattaaaagctaatcaggccaaggcattttgttatcacagcccaataataaatgcatattaaaatattaaataatatattaaaattaagttaatgaataatgaagggaccaggcctcacaaagcccttgttttagcagccatgacaggctacagaaaagacacgtaggcctctgacacaaggaaactccagatcctctggcctcccagaacctaggtccaaaactgaacacaaagaaactaaagatgcccccccacccccacctcctagatacttggttcctaggaactgtttggccacaaaagaaactccaggagagaccaaaacctcccctgtagtctccaggatacagttctgaaaactattggtatcaatgtacaacaggccacctgcaactaacaagacaaagctgtagaaaccacagaatgttccctctcagcactgaccaatgagaataattggcacacaggtggtatttcatgccaaaatatgactttgagaaattctcctgattgttcccaaatgtcaaccaattagaaaccaacccataccttctgatgtaatcctgtaacttttgtctttaaaacctaacagtagacagggaacttcactccctctggaggctgctgcatcagcttactagacagggtccctgtcatggttggatgaacaataaaacattgcttttacagattggtgggtctgtctccctggtggtctctggggatcttcactacttgggcacaacaaataacagataataaaaggttggcttttttaatgttgttattcttaagatattttattttatatgcatgtgtgctttggctatacatgtgtctttatattacacgaattcctggtgcccacttagccacacagctgccatgacaagcttaataaaaaccagactgggagtaggcctgagttttggtttactataaagtagcacctcattccaggagaaaccacaaactgacaccacccaggaatgggccaatcagcatccaaggaaaaaaatatctaacaatccaacctaagggagaagtacctgacattccaaacatttctgaccattgcagatagcagatgcccctgagcccagcacgcacctatctccttttgccaaaacacccctagacaaatgtcagccaatcaggggtcctaaagcttggaaatcccctcgtcccaacctctgttatgatgaatactctaccccaactgggctcagggctctctgctctcactgttgcattggacagatggagggctcaggctcgagcttgaataaaggctctttgcttttgtatatggattcagtctttgtgggtggtctttgagaggtcctcacaatctaggtataacaccacagaggctagaagaaggcattggcctgaaaaactggaattagatagttgtgagctgccatgtgggtgttgggaaaaaacccaggcccccggaagggcagccagtactcttaactgccgaaccatctctccagctcaaggttgatttcttttgttttgttttgtttttgtttttgttttttgagacagggtttctctgtggctttggaggctgtcctggagccagctcttgtagaccaggctggtctcgaactcacagagatctgcctgcctctgcctcccgagtgctgggattaaaggcgtgtgccaccaacgcccagcatcaaggttgatttctttctgttaaattgcagatagcaagcctagagggccaaatgattcatgtaataatacatttaagttggagaatatgaattcatgtttagctatatagaaaaatttatacatacatgtgggcatatgttacatggattaggacagtgacatatgtttgttctaccaggtgagataggacaccactattgtcttagtcagtgttctgttgctatgaagagacaccatgaccatggaaactcttacaaaagaaagcattcagttggagcttgcttacagtttcaaaagtttagtctattatcatggtgggaagcatggcaggatgtagacagacatgatattggaaaagtagctgagatttctaaatctggattaatgacactgggcctggcttgaattttttctggcttggatttctaaaacctcaaagcccactcctaataacacactttgtccaacaaggttacacctactccaacaaggccacaactcctaatccttctcgagtagtgccactccctggtgacttggcattcaaatatatgagcctatggggaccattcttcttcaaaccaccacatccattgcctggcccccacaggcttttagctatatcataatgcaagatgcatttagtctaatctcaaagtccccagagtccttcacagtctccacactgcttaaaagtccaaagtctcttctgagacttatttaacagtacccactgtaaaatcaaaataaaaaagcagattacatacttccaacatacaatggcatacaaaatgtatattaccaaagggaggaaaggaagaatagtgaggaaatactgaaacaaaataagaatgtagaccagcaaggtaaattcaaaattctgcatctccgtgtctgatgacaactcttcagatctccaactaccccagctctgttgactgcaacacactttcctctcttggactggttccacttcctgttaacagctttccttggtttgtagacctggaatctcaaacatcttggggtcattaaatccaggcttcaccttcatggcttcatgtaatgaactctctaggtttccatgcagggacacacctgacacatgcctggctttagcagctttcgttagctgtggacggaaagtctacaacccctttttgtatccttgattctaaatcaagaaccacatggctgaggatgccaagttctaagcttgctagggctagaacatggctttcacattcaatcacatctgcatcatctttctaatgttgatggttttcttcacttcttgattttctttagttcattttcacaagttggaagtttagctgggtggggtcttgccctgaggtcaccagtccctttattccatttaacatcagacttttttttctaaactttttatctccttgaacattggacttaggtccattatactttctggtactcctttttctcctcaaactgtacactttgtatttttcctttctcagcttgctccttttcattatagatctgcataaaagagaccactaataagcacacaacagagtcaatactaggctgtcttgaaatccatctgtcaacactgtcaatccaaaaactcttcaatttagccttaggcagatttttcagaaaagggcaaagcatccacattcttcaccaaaatatcagaagaatggtccctaaactacttaataataatattcttctcctctgaaatttcttgagttgggctgtcataatatatatggctctcagcaccactgtctcccatgctcctactaatatgtcatgttaagtcctgcttaaagcatccaactgtttttctagtccaaagtcccaaagtttgcattctgccaacaagcagcacatggtcaggcctgtcacagcataaacccactccctggtaacaacttctgtcttggtcactgttctattgctgtggaaagacatcatcatgaccatggcaactcccccacctgcatagatttcttccttccttgtgttccttctttccttcctttctctttccttcccttcttccccctccctccctccctctctctcttattcatctatttattttatatcctggccacagcatcccccacatcctcccctcccagttcctccctccattccctttccatcccagctcccactcccccccctcttcttccatctccatccaggaaagggaaggtatatcaagttgcagtaagactaagcacctacctgaagggaccagaccctcacccaccccctgctttagcagccatgacaggctatagaaaagacctaacaagacaaaggcccctgactcagcacatgtgcttagtttctggccttctgactttgcaggagctttggtaggtcagatacccaccctccatgtggcaaggaaccaatcagaagttagctagtggactctggatgtgctttatggtgctttacagtaaaagtggcataacagtgacatgcagagcatagcaaccactctgggaagatctacaggccatagcaaccagttgaccaatcaacacaggacaggctgctcaagccaggaagcacaccaatcctgagattgttgcagacccctacatacgccccttgctctacccaatatattccctacctcgaagccccttagggtcctttttgcctggacccgccatgtggagttaacgcattaaacattaaaagactctttgcttttgcatcagaataggtctcttggtgatttgggggttcagaactacccatgtattaaggctcagcaaggcaactcagtaggaggaatagggtccaaaaagccagtaaaatattcagagatggccccggttcctgctgttaggaatcccacaagaagactgaactacccaactgtaacatacatgcagggtgcctaggtcagtcctatgcaggctctctggttgtccgttcagtctctgcaagcccctatgagcccagattagttgactatgtgagccttcctgtggtgtccttgacccctctggctcctatactcctttctcctcaaaagaaagcatttaggtgaggcttgctttcagtttctgaggcttaatccattatcttcacagtggggagcatggcatgatgcagacaaacatgagttctccatggatgttggaataagattaccatacatgggatacggtgacataggttaattttatttggggagagatcacttacatgagaaactgataacctagggtcagcgccctcagagatctgaccagaacccccagagagagtgtgcctgcttcggctgtaattccacgtgcacccccatacacacacctgtggccactcccaaatgggcgtggtcagcactacaggtacctagtaagctctctccctacaattccccttttagtctaaagaaaagattcagacttaatacaaaactatatacaaatatgacaaaaatcaagtatgcactaggagaaggaaaagtaagaacgtacaccctcaagatctaaagctagtaaaacaacaagagcaaatggcaagaactacatatccagtcctagggtaaaggcacaacagggattgctatagagctgttctaagatagaaagtttaagtcttgtacctaatatttctatctagggagagagaacaataattgtgatggtctaatcttcaacctctgcaaagacccgagaaggaagataacaatactagggtatgcagggagacactgtagccccagtctcctagtagcccatacaggtgtgcatggccacgcccatgagggcatggtcaggggaggtcaaagatgatgcagggacaattcctaagggaccgcgcatacgtggatagccttctctctctggccacgctagctctgggcacgctctggcttgcgtttgggctggtgtttatctgaataaaaaaatcttagccttacggactacggatcatctttgagcacacgcagcacggaataatcaacaagggtaggcaggaagtgcaggcgagcaacttccaaaggtgcagtgaatacagaaacagcaggctacctggacagtcatccaaagtctcacagcagcacaggggcaaccagctttggctaaggcccagagtaactgactgatcaacacagaagcagggaggtagaaaggctgtcttactctgacttggtaaggttcagcagtcttctaatttatctcctgcaagcacagtaggacagcatatcaaaagtcagcagttgaagtgggggcagttctttgtccaagagaccattagctaaagagaaaatagactccgcaaggagtgacattggtgcccaacattttctcgggaatagcttggtgctgtcaggagcaatcatgtctcatgtcaacagagtactaatattaaaacatttaaatgccatattctgcaggtctatgaagtgtttgaagatcaaaatctgtgtctgactaaactcatagatataagaatgtgggtgaaaatatctgtaattcttaggaaccgagttgtacaacggcttaagcttcctaaataatttagcaaggaccaagattacagcaatataactatatacatacatatatgtgaatctctaaaacacaggtagaactgaagtgtcttaataagaggcagaactgtatagggcaacatgattaaaatatcctaaattgtgtcaaaatacatatcttaaacatatgtaaaggcatatatatacatagaatatgataaggatatttgtgtacaaaacatcataaatagaaagaaaaccttacacagtatgacaaaatgtaatatacaaattatccaagaatggaatacaacttgatcttatataagttacatcatatgagaatctataacactgtatgttgtctatagctaataattaataaagtaaatcacaagaagatatattaatctgcctatatcccatcctaaccatatctttcccaaccataccctaaacttatctaaaagagatacccaagtctgaacacccgtttccatacccaaccctaaacaattgaaaaccacccctaaatagatgtatattatcccttaatgtcaacaggagggaaaggggggcattgtattcttagaattacttcctgctgaaatgggacaacgataacctcatgggatcctataggaagaaaatttttagagtaacaaaagtctcgagtggactagctgtaacatttgtgcctagtctgtgtttggcgggagatgtttgactgaggttcttatctgaggctctggccagagtgtaataagaaggtgtaccatttcagccagctagtccagagttatctagagcaatatagtcccaaaccgttttttaggatggtaattgtcagttcaaaggcatcaagttggatcaagtgaaatcaatgacgtggggccccatattctttctggagagttttaagattgctgttaggaaattctttgtttgctgtggaggacttaaacattaatatcaacacagaaatttcaacttttataggtatgcataccgagaaaggcagcaataaggaagaaaataaatatgagagaaattaggctttcagagaaagaaccgagtttagacaaatgacagtccctagattttgttatcttctgtcttacatcaattgacttcttgatataatacagaaagtctgaattttattttaacagcatgcttgaatttagaggaggaaagtcaaagccaactccaaagccagccttggtttaagtgaattgggactaaaggagtactaggaagtatagaaatagtttaacagaattagacattggtaccatatatcagattcttctttgtttgatggttctttttggatggctatcctctctttaggcatctactcattcagtgtctttttgcattttttgaggatgggttttcctgttaagacaagaacaaaacacttcccctacctttgtgaggttcccatacaactagtgggatgtaccttggtggatgacctgtcatttctcttcatcgagaggtttcttctgttcgaactgaatctcgatcaactttgatggtatccaaagcttttcttctgtgtaaacaaaggcaaaaccccttccccaatgtaatacatatctggtttccatactgaggtcaatacatccttgaagtacaccggctgatttagttcagaagtgttttttctattgtccagtgtctttctgtagctgttttccctttctcattagcattaagaaagtttaatgttaataaagcattatgtaatctgtgtttgggtttttttattccccctgcctgtttatagagcatttcctttaagtgtaattagatctctcaaccacttcttgtcttttaggattgtgtggtataccagttatgtgatttatgttataatatttaaaaaatgttccaatttgctggagacatatgctggaggattgtcagtttttatttgtgcagatatacccataatggccattacctttaataggtgtgtgataaaagaatcagccttttcagagctaagagcagtggcccattgaaacttataaaatgtgtctattgtatggtgcacacattttaattttccaaattctgcaaagtgaaacacatccatttgccaaatttcatttctatgtatacctttgagattacttcctgctggtaacagagtttggttatagaatgaacaagtaggacatttctttgctatttccttggcttgttgccaagtgatggagaaatccttttttaagcctttgctattcacatggtgtttttttatggaattctgaggcttctagcacacttcctattaataaataatcaatcttatcattgccttgttctagaggacctggcagacctgtatgggatctgacatatgttaaatatataggatgagtcctattcctaattgtatcttgtaattgtataaacaatgaagttaattctgtaccatcaggaataaattcagcaatctcaatgtgtaagatgactctctgcatattgagagttggtaactctattaagaggctctgtaaaatccataagtaccatgagaatggtgtacaattctgccttttggacagagttataagggctttgaactactttacttatttttcctgatttatgtcctgccttacctgatttgtttgcatcagtatagaatgtagggactccagagttcggtatttttcttacaatacgtggaaagatccaaatcattttctttatgaattttattctctcattttggggatgattgttgctaatcattcccaaaagttactgcatgctctttgccaatattcattatccttccataaggaggaaatttcctcattagttaaaggtacaataatttctgctgggtcccttcctgtcagttgacaaagtcttaatttgccttttaaaatcaaatcagagatcttttctatatatgattttagttttttattctgtttatgtggtagaaatagccattctaatatgatatcttccctctgcatcaaaatccttgaagggtattctctagatggtaaaataaccagaatacagtctagttctggatccacaaggtccatgtgtgcttctagtattctgttttctacccatccttattctttttcaacttcagctgataatatttatggactatttaagtccttgtcccttttagggccattttcaagtttttcaaatcatgcccttttactccaataatgatctgtagctgagaaatctctcccagtaatttttgaagatcattaagagtctggtaacaatctctcctgatctgtactttttgtggtctaattttttgtagacctattttataatctaaataattgatagaatctcctctttttatttttctgggggcaatctgtaacccccagtgaggtaaaacttcctttactgtctcaaacatctttttgagcttttcttccttagaatcagccaacaatatatcatccatataatggtaaaatatggattgtggaaattgtttatgaattattttcaaagacttttgcacaaaatattggcacagggtgggactatttaatattccctatggcaagaccttccattgatatctcttaactggctgagaattgttgtaagtgggcaatgtgaaagcaaatttttccgtatctttttcttgcaaaggtatagtgaagaagcaatcgtttaaatcaatgactataacaggccattctttaggtatcagagaaggcaagggcatcccagtctgtagaaagcccataggcttaattgctttattgatggctctcaggtctgttagcattctccatttaccagatttcattttgataacaaatacaggagaatttcaagggctagtagattcttcgatatgcccagcacttaactgttcctgaaccagcttttctaaagcctctagtttcccagaggtcatcggccattgccctacccagacaggttcatctgttagccattttaaggatagggcttttggttcttctgtaagtctggcatttgtattctgcttatgtacagcctggatggttggtatctgttttctgtagtgccttacaatatttttctgccaccaagagcttgtttgtgattcatatctgatactggaggaatgttaacctgggtattctattgctgcaatagatcacagccccacagatttatcgccatgtcagatacatatggcctcagtcttcctaacctgtctttaagccctgaagttcgagggctttttcttcttccctccattctatttgagatgaattttcaaggacaactgatattagttggccccaatccttaggggtcactctattagtctttgcccatgaatccaccaattgtctcaggtaagtgagtgcattccataagaaaccacagcttcttttatgccgttaaggtccttcatctgtattggctcccactgatatgcaacgaagccttttgagtggtttttgtcgttgctggtttttcagtcatagccactggaaagaagaaggcataatgaccttaggaagtgaaaggttcaggcattatgctggcctgcccctgttacctggtggaacaggcagtaccctggtcagcctaaggttccatgggaactaagtctgcatgcaggtgcagaggatccctttaaaagataggcccctgcccatttacgctctctgtgctctctgttccctcactctgtttcctctgtttccccactctgctttgtctctactgtctcacacctatgctctcgctctgtctctctatggcgaccggccatggcggtcagccatgtaccctgttcctcttcttagtctccccattctgccgggccttataataaacttatagtcttatgtctcatgtctcagcctttctcttttcttctttttaaacaaaagaataacaggaaggtctttctggcatctgaaaggtgtaggtaattttaaatctttttcatgacttattatttgtatctctgattctgatgtatcagatttaaggtcttctaaagcctgtaatctattcaccattgtttttctgagtgtgtgaacttcctggaccttataagtttctaaagatttcatagaattggtcagtttcttgttctcctcatttatatatgattctaaacatttaatattcttttcctgagatattatctgaatggcatgtaagctgccttccagaaacaatgttctatctgctagcttgtcattatcctcagacatggaacaaattttctctgttggttttccagtctgaagttccagtctttgatttttattaattgagtcatcagacatgaattgagttgtttctgccagtcagttaatgttattttgcaccgttcctattttggtcattaacacagcagacatgagacagattttgtcttctagttggccatttttacattccatgttttgagtttttttttcattagatctttatggccatattcaatattctcaatcctttttcataagtgttccatgcctcacattttgttggtcagcgccacggtaagtaagagctctccctacacatccagattcataggcagcaggaagagagacagccgctgggcctggcttggacttttgaaacctcaaagcctacctccagtgacatacttcttccaacaaggacacacctcctaatccttctcaagtagtgccacttcctgatggccaagcattcagatatttgacccaattggaggccattcttattcaaaccactacaatcaccaaattatcagtgcacacccttacaggcagatcttgattcctaatacagtctacaagatggacttggagcaccagcgccaaagtgtaaagaaaaggacggggggaggtgtaaaatcagaccaaatcaaagcaatggtaggaatgtccaaagggatacaaatctaatgaatgatttctattgaatagggtgtcgtgttatagcccaagaccacggaataagtacataagtctgtaccgatataaacaaagcattgggcaaatatatgagtcagagtaacacataagtcttccatacagaaaaaaaaaaaatgtaaacttctgcttcaagaaagtggagtgtgatcccaggaaatagttcaggggataaagtcatttgccaccaaaactgatgacctgagttcaatctctgggatacacgtgatagaagatttgccttctgatctccacatgcatgctatgtcaagcaatgaacgaacttgcacacacacacacacacacacacacacacacacacacacccaggtcacagtaataggataggccctcattgatgtgatgacaacagctctggaagtttgtggcattttctcctcgagatgtctaactccagtctcatcatgagaaaaatctcagataaatagcaacttattggcattctccacaatacctgaccaggaatcttcaaaattgtcgagatcataaaaagcctctagagactatcacaacaaaggagcacctgagaggaaactgggtgaccaaataatggtaattgggaatggaaaaagggagaatcggggaaaaccaaggaaaaaccaatatagacttcagctaataacaacgtatcaatatttcataaattgtagccaatatacaagtataagataataggagaaactatctttacaataattatataaatgtaaaaccgttttaaataaaaactctactaacaaatgaatgaaaggtaagaatatgtgagccatgaactttaaaaactctttcaaaaagcttcatatgaagtgcctatattttaagggcagataaatagctggatattttaatatttctattttatttgttaaacataaagaaacaagagtatttattgatggggatgtcttctgtgcatatgtttctcttattggttgatgaataaaacactgtgatcaatagggcagcaagataggcgggtctaggagatgtggaggattctgggaaatgtaggcagagaggagttgtcatgcaatccctgggagagaggacatgagtgaagcattctttgctaagagaagaccatgtagaaacacatagattagtagtctatgggttaataatcaaggcagagctagccaataaaaagccctagtcatcggccaacggtttcataaataatatagggtccgtgtgtctatttggtggctcaaaggcagctgcaggaccagactgatgggaaagagtgatggtaacaatttattcacactaattttctattttaatatggatactgtgctcaattagagcacaaatgtgaaaacattgttaaacaataagaagctataaatgtgaaatagaaggttagttaagcaaacaaatgaattgtctaccactgatatgaataggccaatgaatgggttttaggcaaggttagaaagagttaaagacagcttacctgaacaagggggagctcatggacccagactgatggctgagaggccagcatggtactgatccagaccccctgaacgtgggtgtcagtgagcaggccttggcaatctatggggccttgggtagtagatcagtatttatctgtggcacatgaatggacttggggagcccattccacatggagggatgctctctcagcctggacacatcgggcagggcctaggccctgcctggggtgatatgacagactttggagatttcccatggagggcctcaacctccctggggagcagaaggtggatggggtggggacttgggggtgttggtggggagtgggggaggaggggagggagagggagctgggattgacctttgaagcaagcttgttactaatttaaataaaaaatattagatttatttgaaaaaaaagttaatgaccagtgacctggggccagtcaaaacacacctctgagggctgctggagggctcagttggttgtggtataaacctgggaacctgagttcaatgcccagagtccaaataaaggtggaaggagagaactggttccacaaagctgtttttttttggtctctctacacatgccctgccatgtccccactcccaaccaatcttatgcaaacataccctcctcccccatttcttactcactaagatagtgacaggctcatgagagagtaatagcctatactgatattcctcagtgtaacagatacaaaacttaaatctccaaagcagtaaacttgtaacaaatacaaggaagggctgacacatttgctgtattacaccctcactgtgtttctaagtcatgtttcaatggagatattcacaggacatccttaaggcacaggaatgaccgtcttcccccttcccccatgagaagagtgttcaacagagacattaacggttgtagagatcaagagcaaattcaagattcctatagtgaccaggccacaaaggtgttttaaactggcttcaggaagcttagcattctatctgttgattgtagcttacacttggtcctaaaaaaaaaaaaaaaaaaaaaggcagcctgtgtgatctgacttaagataatatttgtacttaccattgaaggttttgtggctgtccgctgcaactctgttttgctggagctttctggatcaaacacccataaagtgacggtctataaaagaaaatatgagaggcacaaatcagggtcagtgggttagaaataaaaaagagaacacagttggaaggggttgggggtagagggtgaatcttggagtatttagggggagggataagggtgaggataaataaaatacactctatgaatatataaaattatcaaggacgattcaaatttgcatttccttatagtttatacagatttcttttgttgttgttgtggcaaactcactcaaaatgttcttgactatttcaaaagttttcattattggggctggagcaatggttcagtggttaagagtactagatgttcagaggaacttgggttcaagtcctagcacctacagttggcttagattgtattttgtgttttttttttcccctagaaaatggataattattccctgcttagggttggttttaagttgtgtgcggttgggaatggaagatgatggccagacttgggagtctctttcagaacagtttaaagggtatggatgggatggggtataggtagatgaacatatcttcttgtaaactattttagcaactattagctatagacaacttacattgttagagattcttgtatgttgaaacttatgtaaaattaactttgtgttcctgtcttggataatttgtgtattatatttttcatactgtgtaggctcttctttctgtttatgatgttttgtgcacaaatataaaactatctttatgatattcgatgtatgtatgtttctatatatgcttaagatattttgtatattgatacaatttaggattttttttatcatgttgccctatacagttctacctctattttagagatttacatatatatatttaaaaatttgaggtcattgtccttatgctacacattggtttttaagattgtttaaattattttgggaagcttcagtcactaaaccattatatttctgagaattacagatgatagttacccatgtttcttatacctaatgatgttagtcaggttctctgtgtgctcagagatgtacccaacataggtatttgatcttcaaacacttcaaagacctacagaatatggcatttaaatgttttaataatttagaactctgttgacatgagacataattgttcctgacagcaccgagctattctacagagtatgatgggcactgatgacactccatttggagttcattctctccttggctactggcctcttgggcaaagaactgcccccacctcgactgctgactttggacatgctgtcctaactgagatagcaggagataaacttaatgagactgctaaaccttgccaagccaggataagacattctttcaattttcctgcttctgagatgttctgtcatatactctaggccttagccaaagttggttgccccgatgttactgtgagaccgtgggtgactgtccagatagcctgatgtttctgtcttcgctcacacctttaggaagtcacatgcttgcacttcctgcctaccctagtaatgctattttgcttctcaggtctttgatgaggttgaagactagactgtcacagctaatatcctctcttagatagaaaatactaggtacaagacttagactttccagattaggacagctatcagagtaatctctgttatatgccattaccctgggactggacatgttagaatgtgtacattactcaatgttgctcttgctggtggtagttcttaatttgtgtatgtttttacatttccttctcctggaatatacttgatatttattaccattgtatatagtttttgtatcaggcttaaaaccttcttctttagacaaaatgaggaattgtagtggcatcttgccttgccagtgaacttgtagtgaccacatcctttgggcatggtttcaggtgcagacatgacccggtaaggtaaaaggaggagccggctcacaccctcttgggttgcagagagcatcagaagagcagagacggcatcttctggagcaggaagaccctggcggttatttactgtgctctgtgtaagtccttccctaacaaacacctatttatcattaatcttgggtctggcgaactctttaaacccccacctccacatggtgactgacaactatctgcagttctgaagggtccaatgccctcttctgcctctgcaggcactaggcatgcaagggctgcacagacttatgtgtaggtaaaatatgcaagcaggcaaaagtaaaaatgcaaaaaagtttttgttattttctactttaaaacatcaaaagcagtgtttgtagtttttcataactagaataatacataggtccatgaggggttaaaaatatctttctatactttgaaggaactaatgataatattctgtattaattgtcatgcatctttatgccataaacagacatggcagccttcctacacactcccatgccttttacagaaaatggaattgtcctctgcttatctttagcacctgacatgcatggccagttcaatagaaacacatcccattgattccttatttttttcttgaataatttatttacactgccaaagcaagctatactgagcatagaacaacaacaaaatgcctctccctcccatcactcggttcccacccacagggaaccaggtagctattgtctccatttctgtaagttctgaaaacctttctacagaaccaataaagataccatcttccctccttttaatgcaaacatatgctcagtccagttcctcatgagcatgcccatgggcccatctgctgtaggcaattcctcaatgtatgcttttctgtcagatgactataggctgtgtcaacttgacaattaaagctaatgaggacacttggtttctagggatcaaacccaagtcaccaagctgtgtggcaatacccccagccctgcacactgtgccttcttgctggctccacattgtaattttcccagctactgcacagcaatttccttggtagacttcccatagcaatatgtgagagctctttccttctagctcctcggacagcactgctctgggagaggaaaactggaattttgatgtttttcaactctgtgtttatcttgtgagaaaatgtgagggtctctccctatgtttaagggccacgttcctttcccttgcacatttttcttctgggttgttgttaagatggggatagttgcctttgtccttctgtatttgcctggaggttttcattatttagttcaaaatattttgtaattttttcaggctggagagatggctcaaggattaagagcactggcagcttgttcaaaagagctgggttcatttccagcactcacatggtggctcacaaccatctgcaactccagttccagggagtctggtgccctattctggcctccaaaggcactctgtgtgcatggtgcacagacatacacgaaggcaaaacactcacacattagatttccctaagatggaggctaaatgcaatggtatatgtccataatctcagcaatctagaagcagagtcagggggattgcaagttcaaaaccagagaggaaaacaaaacaaacaaaaatttgaacctagaggttttctaagtaattctattattaattcctaagttaattgccaagaaagcatggcccatcatctcagtcctttggcttttactgagatagcctgccaaatgttctgcatgtttgagatgcctacacagtatgagatattaaagatagtactagcaatataattattatattacatttatttgtggcatttaaatatttgctggctcctggtgattttttttttagctgtacctggcctttgagagcttcttagcttctctgctgttgtgttatcttatggcaggcttctcttatttgcttctgtagtagttcttaagtctcttaaatatggggatggggtctttctttttggaaaatcttagtgatataagttcctaagtactgtgacaatggtttatattctttatctcgatgctattctaggtgatgctgacagattcctgggatgtataatactaatacataatagaagatgattgttttaggtcttctagacatttaaaatgttatttattattgcacatgtatgtatatatatgtggttggtggttgtgtcatggtgcatatgtggaggtcagaggacaattttgtggagttgcttctctccttccacatttaagtgggttctggggattgaacttgtacagcaagtaccactacggccattgatacttcttgctgctattttattccaactttctgcatatttaaaaaagatgtcaataattcttggaactgtgccaagttttagattttagaattatactggatttgtaaattgaataagcagctttgtataatgtttttaaacaagctgtaatgacacaataatgagggtagggacttgtcctgcttgcagctgtgtgtccagcacatagattaagagatgctagagatcagatagtgataatctgctggaacattgttagcatcatttgctctttaaaggctagcaaagaccatctgttgttggcacctttcaaaatatttgtaaattttcttcccactctctttagtagaatttggccttatcaaatgctctactttagtggtcaactcagttactacatattgctagaaaaatctagacttaaaaagtgttattagagagttcatgcattatatattttgcctaactgtaattatgtctcctttgttttttggtatagtgttttagacagggtcttgctggatagcccaaaactgttctatatccttgataacatttgagattagcagttgatcaagcccaccatatagctgaagataaccttgaactctggacctgtgtctctgaagtgttgatattataggcatggaccagctaccacacccaatttatgtggaacaatccaggaaagtgctttaccaaataagctacatgtccagcctttaaaaaattaatttaatgtattttcttttgagacaagaccttgctttgaagctcaggctggcctcaaattcctgactctcctgcaccatccttctgattgctcaggttacaaaccatgactggctcctgtaaggcttctgtattatgtgggtcagacttatcaaatgtaccatgtaataaaattgggaacatccaatgatactaatttataaagccatgatataagttacataatattcataaaatgtgaattttcataaaatttttatgaaaaagcatattttaccaaataagaaaatgtctgctgatagtttcaaattttctttagcattttaacagaagacacttgaataatcatctctgtttctgctatttaatggaagaatacagggggaaaaatccaccttgtataattttatggctgaacttccctgactaggccccctggaaaaatgaggggtcttcaaaacctactttgaacactactactctatggaaaatttatggcaaaagtactttgggaaattcctcatctggaaacataaatgattaagggaaagcatgcagtaatgacaagtgggtatgcaaggttgacaaaagttacctgggttaaattatctaaaatgtccctgttgggagaaaaagaaatacattttaataaacatcatgtaagcattaaacagaatgctataatttcaacatacatgtttctgttttgttttttttacaaatccatttttatttatttacttttcattagtttgaatctggaaagggtacaacatcacacagattctgtgtccaatggcctttgcaagatggtgacttcagaatttggcgtgaaccatgccactgtttctatacctgaatttcctttccctagatcaccctggttttgttggctttgcctccaggagtcactgtgtttttttttcagtccccagtaccacagaaataaaataaaataaatagaaataaaatctcgacaagggattttgtagaattttgcaaaccattcaaaaaatgtatagggaggaaaacaaggttgaatgtagctagagccagagcactggcctataatcctaccattcaggagacaaagcaggaatgtagttgtttttttgtttgtttgtttgtttgtttgttttactctttggaggtccaccacaataccaaataaatagagacttattcttacttatgaatgcctggccttagcttgggttgtttctatccagctttcctaacttaaattatcccatctctcactatgttttgtctctgggctttttacctttcttagtctgtattgtttttttctttttactctgtggctggcagtatgactgggtggctggcccctggagacctcttctcactcctctctcttccctcaagcctagatttcttctatttattctttctacatgccagccctgcctatcatttctcctgcccagctattggtccttcagctctttattagaccaatgtgacataaaaggatgcaacacatatttgcattattaaacaaatattccacagcataaacaaatgtaacacatcttaaactaatattctgaaatacagaagaattgagacttcaaagccaccctctactacctcgtctctaaaaacccagggctggagggtatagctcaatcgcagactataaaataaaggccttcggtttggtccctagcactgaaaaaaacaaagaaacaaaacaaaacacgataaaacagaagtcccccccctcaaaaaaaggatgatagtgccaaagaagaatgggcacttacagtcatacttaccagattttcaaaataaatatatgaactcagaaagacaaatgcttcatattgtccctcatatgcagaccttagcttgtagggtgtgtgtgttcatgcctgcgtgcatgtgtgcatgtgttcgtctgcctaaaaatctaggaagaagactaggagaggacccaggttcaattctcagcacctacaagatgtgtataggctataggcatacagtttttcatattcctgggttcttcatccccaccttgaatttgtatcagaatcaaacccttgattcttctcaatctatatatgagcctgagtcttcaacagttgcatattgtgagcagagaatcaagagttccactgaagaagagtctgttagtctccaaataaaggtaacaggagagggtattgggaggttcccagagatcccaggaactagacatggagtaaatcagaaaagtcatgatagcttgagagcttttagtcttatctttagcaggtggctcagggtacaaaaagccttccatctgggtcatctgatcttccatcaggagtgggattgagctgtgagtggtgaatcctcgtcttgattccatcgaccttaagggcagtcgggatactcaggatcactgtgtgtggtcccttccagtgtggtccaagggcttctttatgatttctccagacccaaacaaagccacctggtttgtgactgtgtggcttgacaggtggcaactggtaaacatgtctcaggagcaggacccattgtcttggactgtctggagagcctagatggacttaagaaacttatgctcagacatcttagccatgacttcttaagggagcctgggaacctagggatggggtctaccaaatatgatttcatacgatgttaactcactgtagggagaaaccctgactaaaggtgccgctgaccacgcctgctcggacctggtcagagttacataacaagggtttaagaaggagggaggcgcatgctcggctctctcttttgcctggctgagctgactgggaagcattttgtgggtccgtcctgctcaggtgcaaacctggccactggctcccttttatgagtacttgcccccaataaactactgctaatcaacatatctctgactccactttgtaaacatctatatgtggtgtcagaagttttgggactgaatttgaacccacgggtggattgtgacctggggacctcattttaccccagccggtggcaggtggggtttatccccctgccacattggcgccggggtaacctttcccctctccctcccgccccacaccgagtctctcaagtacagttcgctggcactgggaggaacccaccactgccaccgttgcctccgtgctggtcatctgtgttttcagtcttcagccatttgggggctcagcctccctggttgccgccgctgtcgcctgagggcttcattcctcccgggtctgtctcccagccaaagcacggttcctgcccggtgccttccaccgtttttcccaacctgaggctcctcccgttccattttagtcactgcagccaccgtcgccactgcccagtgcatagctgtgtagtgctggatacctctaggtgcccagaactggcgactgaccggctacgaccctgtgggtttccacagcccttccctccgttctaactcatccaaaagccatttaggtgtttttcagaatagtctggagcccaatttaaccatccactgctgaacactgcaccaccacaactttccacctgcgccacctgctggtcaaacacagttactgcgactgtaagggaaactgacacaggtaaactcacatcatggcagaaaacctgacaatgcagacaattggggatattcttgcttcttacgtgatttgatgttagagaaggcttatgacctgccagtaacggacctatatactatgttagcggtcagcttcatagatcatgtgatatctctaacctgaggactaagacacagcgaaaaggaaaaagaacctgtaagaattatgggcagcttagaaagttggatgcaagatataaaagccggccaggaaaacttgatctctgaaatgcaagacatggaatatttacataaagaagttgaggatattaaatctggccatgctacattactaacacaggtagaaaaaactcacagccaaatagaaagcaaaatttgttccatgtccgatgccttaaatggaaagatagctaagaaccaggacaggattaacgaactggcacagacaattcactccatgtctgatgaatctaccaccacaggccaaaagctggagtctaggattggatatttagaaggcaattttcatgacattcagatactatctaaggatgagaatattaaaggtttataagcacatgtaaatgaagaaacaaggaaacttaatgattctatgaaattcttagaatcttatatgattaacgagattcaatctctccacgagacagtggttgccaggctccaagccttggatgactccgaatcggattcttcccaatccaatgcacccattccaatcaaacatcaggaaaccttcctaaggttgttacacacacaccactggtcttcccagcgactatgacagaaaaaaatgccataaaaaatatccaaatggccatgtcgaatatcaatgggaaccgatacaactaaaagacttgaaaggaatcaaggagtctgttgtctcatatggtctccatagcccttatgtcaaagaattattaaatttgtgggcaatttttaatagagtaacgcccacagattgggaatgcctaatattagctgtgcttgaaaatttgtcctatatacagtggagggctctatggagggaggaagaaaaagccctcgagtttcaaggcttaaagaaatgttatgaagctccccaaaataaaattcttggtgggggtctttatgctgacccacaggctcaggctgcatatgatgagcacatattgtccttatgcagaacagcagccttaaatgcctgggacaagcttcatgaaccaggagaaagagtagaaccctataggaagatagcacagggactgacagaacagtttacagactttttacaaagactatccagggcaggagagttacaggtagcagatttagactctagaaaaatactcatacaatctctagcttataaaaatgcaaatccactatgcaaaataatgcttttgcctttaaagatcagatcagcaccactggaagagtgggtcttgaatactataatgttcaagatacagagcttgggtaggagaggcaatctcaaaaggtttcaaaagacaccaagaggctagatgctctaactgtactgaaacagaaacttgggtaggaagagcaatccccagagggttgagaaggaatcaagatactggatgttttaactgtggcagaataggacatagtaggagaaattgtaggcatggaaattccaacaatgtctcatataaaaggcctccacctcctagattatgtaggagatgtggtaagggcagacactggaccaatatatgtagattgaccaaaacatacaaggaaacctgttacaatcaggaaactccttgaggggactctcgaaggcccccatgtcgagaaaggtctggccattcccagtcactgtggaggacaatctctagcaggatgaatagaaagtacattgcctattgtaaagaatggtaccactctagatagtagtttggctagtgaggaggaatcaaaagtgactggaggagacaaaaaaacacataatttggcaaacttctataaaggatcagaggcctcagttgaaagtaagaataaataataaagttaaagtaagaataaatgttattaccggtttggtggacactggggtggatgtgactattataacccaaaagtcctggcctcagatttggaccctaaaagaggtgaatgttcaatttttagggattggaactctatctagagtatgccagagtgttaggtgggttgtctgcataggacaggaaggacagagaggaaggttaaagccatatgtagcagatattggaataaatctctggggtcatgatcatttacagcaatggaatacccagattaacatttctccagtatcagatgcaaatcataattaagctctagatggcagacaaaatatagtaaggcactttggaaaacggttaccaaccatccaggctgtacatgaacaaagtgcaaatgttataccttcagaggaaccaaaagttctacccttaaaattggttacagatgaacctgtctgggtaggacaatgacctatgacctctgagaagctagaagctttagaaaagataattcaggaacagctacatgctgggcatatagaagaatctaccagcccttgaaattctcctgcatttgttatcaaaaagaagtctggtaaatggagaatgctgacagacctgagagccatcaataaagtaattcagcctatgggctctctacagccaggaatgcctttgccttccttgattcctaaaggatggcctatcattgtcattgatctaaaagattgattcttcacaagaaaggatagggaaaaatttgcattctcagtacctacttataataattcacagccagttaagagatttcagtggaaggttttgccacagggaatgttaaatagtcctacattgtgccagtatttcatacaaaaaactttggagataattcttaagaaatttccacactccataatttatcattatatagatgacatattattgtaggattctaagaaggaaatattagaacggatgtttgagacagtgaaggaagttctacctcgttggggattacagattgccccagaaaagatacaaagaggaggttctattaattagttaggttataaaatagacttacaaaaaatcaggcttcgaaaagtacaaattagaagagatcgttatcaaactcttaatgacctgcagagattgctaggggaaatttctcaactacagacaataattggagtagaagaacatgacttaaagcatttaaaaatggtccttaaagggacaaggacttaaaccatctatgaatattatccactgaagcagaaaaagaattacaatgggtggaaagcagaatattgggcatacatgtagaccatgtggaccctaatttagactatattcttgttattttaccatccagagaatacccttcagggattctgttgcagacggaagatattatattggaatggatatttttgccacataaacagaataaaaagctaaacatgaacatagaaaagatttctgatttgattctaaaaggcaaattaagacgtcatcaactgactggaagggacctagcagaaattatagtactttaactaatgaggaaatttcctccttatggaaggacaatgaatactggcagataacttgtttagggttgggtttggaaggaggtgttcaggcttggacatctctttcagatgactttagagtttagttggaatagatatagttaggatgtgatataagtagattattatatcttcttgtaattcacctttatgataattaattatagataatttacactgttaagtttaaatcctctttagactaaaagaggaattgtagggagaaacccactcgggcctgatcagagttaaataacaagggttttagaaggagggaggcacatactcggctctctttcgcctggctgactaggaagcattttgtgggtctgtcctgctcaggtgcaaacctggtcactggctccctttcttgggtacttttccccaataaactaccgataatcaacatatctctgactccactttgtaaacacctataacccacagtagtagggagtgttccacacctggaatagggcaaagggaaggagggctgtccagtcatcactagtttctagcgttaattgagttaaggtctcttttagggtctgattcatcccttccacctgtcctgaactctgggggtggtatgcacaatgtaatttctaactactccccagcattttaactaagttttgtagtatcttagagatgaaagctggcccattgtctaaccctattatagaaggaagtccataccttgggatgagttcatggatggtcttcttgattactgtagatattgtttctttgttagtggggaaggcttctacccaacctgaaaaagtgtctgaaatgactaggagatatttatacccatatttgccaggtcttccctaagtgactcccggtggacttcaggggaagttcctctttccctcttgctttgagagggttcttttgtgggttagtggcctgcacaagagaagcattgagtcacacaatcctccaccaattgatttatattgacaattttgaattttgagtgctccaggagttcttttaattttctttggcctaaatgcattcccctgtggacttagtagatcaaggacttgtccaggtcagttggctgaatgagtcttccattcaaagtgtacctccaccccttttttaacctgggtgttatataaagaggcagagtctttatcatcttgggcatttagacaacacagggtctggtattgctgtcagtaggaagggaagccttcttggatgcctgatctgcttttcctttgccctgggcgtcatacgagtttcatttttgatgtcctgggcaatgaaggatggccagtcttttggggagccagagggtggcaataagtctaggatctcttgtttaaacccccccccccccagagacagggtttctctgtgtagctttggagcctggcctggaactctctctgtacaccaggctggccttgaactcacagagatatacctgcctctgcctcccgagtgctgggattaccaccaccgcctggccctcttgtttacttttaatagtccttcctttagcacttagcaagcgtctttctctgtagatggccctgtgaacatgtgccatggcaaaaacaaaaacaaaaaacaaaaaacaaaaaaaaacagctgtccatataaacattgataatcagtttcatcttttcataattgtagggctttggttggggcaatcagtccatccttttgtgctgaggttccagaaggcaaggctgtggcccagatagtctctgagggtgttcttattcctgcccctgtatacctggtccttcctgaataaagctgctgctgtcggtgaagtatgaaaggtccagatctggccaggcgatgtcagtagtatccagttggattccatgtacttgttgcagccggccactagctcttacctccacctcagaccaaaatggcgatcctgcctccacgaatcctcagactgtaatgcttttcccatccaggaaataaatctccacatgagaccctttgattcttgtttttattcctctctccacccagccacaccactcctgtctctgcctctctagtgctgggatcaaaggggtgagctctgttactcttcactcttgtgtaggccaggctggcctcgaacgcagatagatcagtttgcctgtctcctgagtcctgggattaaagttgtgtgccaccactgcctagctctatggccagatagtatggctgctgggattgaaagtgtgtatcaccgttgcctgacctctatgtcttgtggctagctttcttttctgaaccctcaggcaagctttaataaatcataaataatatatcaccacacaggccagccagaggtatacagagagactgtgtataaaaacagacagacagacagatatgtagatgcaataagtattcaaattgtagttgttgatattttggtaacttctaattcaatactactttggcaatatatttgagaacatcttggttggtgaataaaggattgtatgctaatcatgatatggataatgaatctgtgattgattatttttaagtgggagctaaataaaagccttaattacctctgtattgtgtgttacttacacaactctataataccacatgaagcaaatatgagaactatccacagacagaaaccgttcctcttccttgttctaaaaagaaatgcaaaagaaaaaatatatatgttaaatttgaaatagatacaaatatggatataagcctgaatatcacagaggaattgttactcacctaagagcagaggaaagtagattttagactagaattaataacacatatacagaagatgttcaactcctcagcttccctatatgaatggcaaattttggagccatctggcaacttgctatccttactgtgtctgtcctatttttctccctggtgggcacacacttctattcatctgctggatttgtgtttaccaactacccaggtgacagggtgggcttggcaatgtgtggaaatgctcttggttgtttaaactatctgtctgttttgcaatccagcagtttcattgccccttttaatcatttgtattcatgtgtgttttcttgaattgaaggaaaagaagtggaataaaagacgaatcttcagtttgcttttggtcctagatattgtcattggaatgtgtgacatgaggccgattcctctgagagtacattaacactcaggacacgggcacactacctgaccaaagtgctaaatagtagggttgaggtgttagttgaatggtgcgtacttgcccagcatgtacaaggccttggcttcaatccccaccatcatgaatgaattaatgaacaaataaaaaaggaaacacaagtaaaaattagatattcacaagttatactcagatatgaaaaatgacagaatgacagtaatttttaaatagctcttatttgtagttatgactaaaactatttaagacaatttgtgttggaaagtccaaattagaatgtaacagtgattattttacaagattcaatgaaatatcactaaaatcaacttactttgtctttgacatttggttttatattataaacgccagcagaatcacagtgtaattttgttctggttgagctagtgttcaaaaataacagaaaagaggaagtcattactgttgttcttttgtaaaactttaaaaattagaaaaataggagggcccaggccaagtccaggatgatgtggtggactttggggaggccccatggagggccctaccctccctggagagcagagggggaatgggttgaggaaggtggtgggaggctggggagaggggagggagagggagagggagagggagagggagaagggattgacatgtgaagcaagcttgttcctaatttgaactaataaaaataaataaaaatttaaaaatccaaaaaaattagaaaactagaaaaagaaaccaagagatggagcctggggcctgctcgatggaacaggaactatagagtacattgaccatagagttttattatgggtgggagagcgaaagggggagagagaaatggaaaaacagagcagggcagaaagtaagagagaagaattagtggtcggccaccagaaacagaggagagagagagagaagacaggagagaggtacagagaggtacagaactttaaagggaaagctgagcatgccactgaaggttcacgaatgcacagagtcctccaataacgagaggctacgtcactgtgtatgccccacttgttgttagggggtggggtctgtctcttaaagaggtacaagctggtcagcattaatgcctgaacctttcaattacaaatgtattaaataagactgatttaaaaaccccacctacaacttttaagcttaaacaacttaattgtatgctagaatgagaaaacaaaaaacaaactctaatatagcaactgtcttagtcgctgttctattgctgtgaagagacaccatgaccaagtaagaaggcatttgatttggggctagcttacagtttcaaagggttagtcatggtggggaccagacagccatggagctggagcagtagctgagagcttcatatcctgatccacaggcagcaggcagagagagacactgggccaggtgtgagagtttgaaacttgaaagcctacctcaagtgacatagctcctccagcaagggcacacttactccaggacacacctcctagtccttcaaacagttcaactgtggctaatcatgcaaatctatgagcttatcggaggggaataggcattctcattcaaaccacagcagcacatttgacttcttttttttaattttaatttttataattgtaattagaccaattttaaattagaaacaagcttcttttacatgtcaatcccagttccctctccttcccctcctcccctgcccccacaactccctatcctaaaccctttctgctccccagggagggtgaggccttccatgggagaatctacaaagtctgtcatatcatttggggcaggggatagaccctcccctgtgtgtctaggatgagagagtatccctctatgtggaatgggcccccgaagtccatttgtgaactagggataaatactgatccactacctggggccgcatagattgtccagacctccaaactgttctattttcaaagcaagctagcctttttttccacatgtgtttcatggaaagaaattgacataaagtcagagctttgagtctgatcatctacattatgtgattgagttttttacactgtagggaagacatggattatatatggcaaaaaacaaacaaacaaaaacttactttgaactttccactttacaaagctctggtatttcccatgatgaaaaagatgttccttcatattctagcgcaatctaagaaatgagatgaaagttcatttaacaaaacaaatgctgttcatctaggtgttcatggggtcctacttcctcttcttccctccagaaatatgaaagcacacacacatacatatacacatatatcacacacatgccacacacacataaacacatacactacacacataaacacacacatacagaccacacacaatacacaacacaaatacacaccatgcaataataattaagttaaaattgtctattaagcatttaaaggggaatggtattctgataggttgtggagattaaaagtgatgaaaagatatgattctttccttaaaaacaagctgctttagttctaaggtccggccattaacacatcaccatctatcaaccatcatgactttatggattaccttttccctatttctaaactctctctctctctctctctctctctctctctctctctctctctctctctctcacacacacacacacacacatacacacacacacacaacagagagagagagagagagagagagagagagagagagagagagagagagcactaggagtacaactcagtgttttggggtagagtatatagcactagtcaaataaaattagaagtcaatataaatgtaggtggggaaaaactcctagagtggctgtaatcttaaagcaaaaataaatcaaagtagacttttgagtggttctttgaagaaaacaatcataatgtaaatcacataaatttgcaaaaaaatcagtaatagcatttgatattatcaaaaattaccatgtactatgtaagttacagttagaaggatatttatagccttatatgtatacaaaagaaacatgcttgaaaacaaactcagttgtcagtaggagaataaaagaacatcagagaacatccctcagaagaaaggagttttttttttaaagagaagaaaaagaattgttagaaagaaaataacatttataggaagaaataatttttataagtcactagtgtggtggttaggttgtcaacttgactacatctccgatctctcagcattttcctgacttctggtttttattatgtagaccaattaagaactcctttttacattttggtgtccatgatgtggccagaacattaatagcaggacaggggcaaattgctccacgagggcccccatccagctctgaaaaagtcaacagctgccatgggtttgctcaggtcaagcggtccatgcctgactccctgtttctcccctctacctggcaccaggggcttacactatccctagaacttttttctttcaatttggtgctttgacccagcctttatttagactaaagggtcaccctcccagacttcatgacttcccggagctggcacaacccatccagtgcacatttcccgctagccaagtcctgatcggcaattggcaatcagcgcacgcaggttgccccctttcccctttctctttttgtttttgttttgattttgtttgagtttttgcttagaatctaaagactggaaaacattgggacgcgtcagaccggagcttcagagtccttgaacttgctttagcagtacacttgtgacacctgctggccaaacatcatcattgcaacttaaagttaagcccatatgaggcaaggatatttttgcgttttaagctgataaataaattaaaattttcgtttacaatttattgactacttctacaacaatggcagataatatcaccatccaggaattttaaaaaccttttcatttctactctggatggaattttaaaagtgggatacaacctacctggtatgtatacactcttatcttggtaatccatatcatatccttatccttaaagaaatggtttgataatggagctaacaatgaggaatgataaagactttacagactggtaatgagagcttagcaaaaaggattcatctaattgaaaatgaccatcatattttgacaattcacaaaatggaacatgataatgaactcttaacagaaaaaaattcattccatgtctaagagtaatgacaagctcgcagatagaacattgttttttgaaggcaatatacctgccatccaaataatctctaaggatgagaatattaaatctctggaatcatatgtaaataatgagaacaagaaactgactgatttaatgaaatcctcggaaatttttacagttcaacaagttcaaatgcttcaaaaaatggtgagcagattacaacccatagaagaccttcttaaagccgatacaccaggagttaaggtacaaactaaagagaataaaaaagatttagcatcgccaatacctttcagagtcagagatgactcaccaaaagtcatatcatcatcatcatcgtcgcctgctatggtctgtcctgttactatgaatcaaaaaccagcaaatgatgaacacccagaagggtatacagaatgcaaacgggagcccgtatgtacggaagattgaaaagatattaaggaagcagtagttccttatgggacgtgtgaggaagtagtaaaggcaagggctacaagaaatagaataactccagccgggcggtggtggtgcacacctttagtaccagcacccgggaggcagaggtaggtggatctctgtgagttctaaaccagcctggtctacaagagctagttccagggcagcctcccaagccacagagaaccctgtctcaaaaaaaaaaaaaaaggaaggaaggaaggagaagaagagagagagagagagagagagagagagagagagagagagagagagaataactccaaatgactggcttcaattagtctcagcagttttagaacttggtccacagccgcagtggaagtcatattggagggaagaggcaaagacccttgagcagcaaggcagaatcaaaggatatgaggcttcccgagatcaaattcttggtgagtgccattattctgatgcagatactcaagctacatacaacggacatatcttgtcccgttgccatacagactcaaatgcttgggacaagattcaagaactagggaagagaattgagtcatatactaaggttacacaagacccaaaataatactttagtgactttttgtaaagattgacgaaagctgtacaattaggagtcgcagatccagaagctagatgagtactcattgaatctctggcttttgaaaatgctaatttagaatgcaaaaagttgcttgggcccttaaagatgagatcagcaccaatggatgagtggaccctgcacacaaccagtgttgagtcttctgactataacactgaggcttgggtaggagaagcaatctccaaaggtatgaggagacatcaaaataccaaatgttaatcgtggtagaataggccatctgagaagaaactgtagacaacgaattcctagaaataatgcttcttctggaaataacccaaataggaggccccaaccttctggattatgtagaagatgtggcaaaggccaacactggaccaatgaatatagatctaccacagacaagcaaggaaaccccttaccaatgggaaattcctggggggggggctctcaaaggccccatgtcaaaattggtccagtcattcccagtcactctggaggataatcctccccagaacaattaggaaatgcattgcctattgtgaaaaattgtactgctctggatggtagaatagttttattatctgattcaaatgtacataatttagaaagaatgtttgaagaagtgaagagaattttgccgtgttggggattacaaattgctcctgaaaaaaatacaaagagaagagtctattaattattggggctataaaataggttttacaaaaaattagaccccaaaaggcacaagcttggagagattgattgcagactcttaatgactttcagagattgccaggagacatttcccatttatggcacattattggggtaaaatctgatcaattgattaacttaaactaatggtttttattatttagaccaattaagagctcctttttaatgctacattgtagtgagctggggaagccctgggtgaatgaagtcctaagtgaatgtatattgtggacatgcacacagccatgacaaggaccagcacccctggagcacaggaaacgggcaaagtgttccccatatggatcaggctaaatgctagcaaagtcttcttcctctggtccatgtatgagtgttcacagacaattgttcagtgtatgcagcttccccctctcatgtttacagcctgagacagctcacctaacaagacttcccacacagactagcaaacccttcccctgtgttgtgaagaacgaacagactgaggttccagattgttgcattagtaggaacggctccgttagagtgcacagcccacctggtcacgccttcaccatagacatcggccctttctgcattcccttaccaccttgagttagggttctagatccaagccatgtgagacaccgcgctgtgtacctatttaagggcatgtatcagagagggtaccatagtaaggtgatatgagaagaaaaaggagagacaggtgaaaacagctgtgaaacagagtatggccaactctctgaaggctcaaaaatactcattttttaaaaataatttcaatacttacagaactcctggtactaaaaatggaatagtccgagccattaatgtaatatctgtggaggaaaaggtgagattcaaatattaacagtaatttctcctctgcatattagggattctattcatggttgggggatacctgagcttccaagaactctaccctccctggaaagagaacctagagctaaaagtaaggttaacaatggccatcagtctagctggtagttcttgctcagcccataggcattgaaatgatgcaagaagtaagtcctccccatattcacttttgattttgaaacaggatcttgccacattgccctggagagcctggaaatcactagcctcaaattcgtgatgagccagctgcctcactgtggtgatacattgtttatgatctaataaggcttgcctggacatcagagtgcaaagccagccacagccatagaagccaggcagtggtggccatacctttaatcccaggactcaggagaaagaggcagatgggatgtctgtgagttcaagaccaccctgggctacataagagtgaaacagaactcatacctttaatcccagcactagagcgactataaggagctcagtgcagtctgttagtgttcaggcatctgtactggcctgtccttggagttctgacaggacacgccctcagctgcagccacctgtgcacattcactatgatcccttttaaaagggtcctgaccacttcccatcccccctctctccctctctgtctgtttctcccccaccccaccccctcaacaccccctgccctgcacctctctttcttctctcctgctgctcctgtctccagaggccagtctccctgctccttgcccccccctttaaatgtgtgtaacaatttttttaaagattttatttattatgtatacaatgttctgtctgcgtgtacacctgcgggccggaagagggcaccagatctcattatagatggctgtgagccaccatgtgggtgttgggaattgaacacaggtcctctggaagagcagccagtgctcttaacctctgagccatctctccagcccctccgtgcccctttttatgatccctttccctaattaaaaaaaaaaaaaaaactctctgcttgaaccctgttacatggcatctttctctctcgctctgcttttcttaaattacaacacagtctcaggctgcagtctgaggtttttggtggagagcattgcagactaggagtctgaagtttagtggagacagatgtagttggattcagtctgaggtagaggtaaaagctggtggcttggctgttttgtttttctaatcttcagcttgaaccccaatatctgtctctgggtttttattatttgtgctacactcactcctctgagtgatgggatttcaggcactcacccacacgcttggctgaaagtaaacactcattatgtatattttgtagaataaatactactgaatatattaggtttgactccttcacttatgaattcaattaaaattcaggaaactaaagaatggagtttcaaaacccagtagttttctttttagcatactagaaataaaacttctaagtccttgttcacgattgtttttacaccattcattatccagggcaccttaaattctatttaactcatccatctcaggtggcattaatgtaacaaatataaggcactatgtacgtgtaattaaactttgtgtagtagtctcaaagtttaagcacagacagaatttgttttcataatatattcaacccaaaatgtaatcactgtaaaataatgattagtaaggtattttaaattatttttacttgaaagacccctgtcccttagccctttctttctcaagtttgtctcctcttcctcctgttggcggcttccccgatccccacccccggcggcctttccccgccacccgccgcacgcccggcccgagaatgagcaccaggtgggccggcccaagaacaagcaccagatgggccggcccgagaacgagcaccgggtgggccggcatgagggcgagcaccaggtgggtcggcacgagaacaaacaccgagtgagccggcctggagccctgcccctgagcccccgcccgaagagaaacactccgtcccaaggtctccgcccccaaggtcagccatcaggaagggggggggaattgagtctgctgtaccagacaccagacaccagaccttgagaatatgctgatctggaatggctctgtgtctcatttgaaccatccaatggaaatgattctgtatttcgcctcatttgaaagactctatgtttcacctcatttgaataactctgtactttgcctcatttgaataaccctgtatagcgcctcatatacattgaccaatgggaatagctctgtacaatgcctcattagaattgtccaatagaatccctgctcctagcttgcgcctttttccctatataaggacccctttcccttggctcggggcgcttggcctcacagaagctaagtcgcccgggtacccgtatctccaataaagcctcttgcggttttgcatccagttcgtggcctcgctgattcctgggtgtgggtctccctctacgaaagtgcctcttcgggggtctttcatactaattctttgaaacctgatgtgtgcattacattttaaaatccatctcaatttgaagtgtatttcaagagcttgaaagtcacatgtggtcagggatgctcataaaacaccttaaaatccctctgcctgcctttccctttgataatctattccatgtctaccctgaatatttaattgcctttggagtgagtccacccctaaaattttaagtcaagaacatctttcttgtgtgtaaggggaaattgctaggatgcaattatgtagttcctttatcagaattacacaagcctcaatagtgctgtgacttcttccttcaatggttatccaccaccagtagagatttgctccttccacacggacatgtacagatcaaataagaaaacacatggttttatatagcgctattaattaaaatggagcagattttcccatcataggtttccctcccccagcaagtgtgaaccatctctcactccctatggatttaatataagatccttttcattgtatttgggagtgttaggagacaggaaaaatacaagtgggagctttggcatcttaagacaaagttaaagtatgcaatttaatttgtgaatgcactggaggttaaaggatgatgctcccttctctggaagggttggtacctgctcctgcatcagctccacctcacctggggatgctacaaagtgcacacaacctactaatccagacagcatgataaggacaatgccttctccatcttgcttcattcctgtgtcagttatttaatgtgttaatgttggcaatggatctgagggcttcgcagatacattatggctctgactttgaattctagccctggccctttgaggaaaaaatgaaagagcattcattaactctaacttttccttctcttaatagataactccctatgtagttttgtggggttttttcccctttttatacaattcatggattatgctctttgggtgagccattttctcccaagctctgcacctatatatgtataaattgacaaaatattgtctttgaggaagcattttggggactaaaatcattccattccattcatcacagattcaactccatacacctggtggataactagagggaacatattcttttgaacatactgtcctagttggggtttccattgctgcaatgaaataccataaccaaacatgttgaagaggaaaaggtttatttggcctacacttccacatcatagtttgtcattggaggaagtcagaacaggaactcaggcagggctgggacccaaaggcaggagctgatgcagaggccatggaggggtgctgcttactggctggtttagcatggcttgttcagtctgctttgttatagaacccaggaccacccgcccagagatggccccacccaccatggaccgggccatctcccattgatgactaattgagaaaaaggcattcagtccctcaactgaggctctttattctctgatgactctagcttatgtcacattgacacacaaaaccagccagtacacacagagagaatatttacaaaattgtatcacttagttggccccaaggcaagtgccagaagatttccaaaaacagacaccatgtggacacattctgtggcaatatggtggcctcagtaagaagctattacaaagcttagtagagacagccaggtctctgtgagttcaaggccagcctgatctacacagtgagttctaggacagccagggctatgtggctattgtcttcaaacaaattattataacatctttacatgtttggaattttaaaacaaactgctagagctgaggctggagaaccaggatttcaaacccagtctgatcaaatgagtgagaccttgtctcacaaaacaaaaacaaaaccacctacctgtaaatgaaatggatttcatgtcattttttatgagctataacagaacaatgctataagggactctgacattttatagaaccctatgaagaaagacaaggatctaaaactattagttaactctctgaagatcttagaactgagtgtgaaggtatatgactctagtcccagtcctcaggagactgaggcagaaggaacagcctgtgctagacagtgagaccctgttacaaaaacagaaaatgagagagaatgtgagtgaactagagagagaatgaatatcagaataagtccactaatatagaagggattttttaaaaatgcaaacaaaaatgtttataatacagaacagaggcacaaaaatgagtctggcaagaaagtttatgacagggctgatcaagattttttaaaagatacaattaaatgattttaaccaaaaggtatcataattagagataaagcagttatgaaaagacaatcacggggccagtgagatcgctgtcatgttagggttctactgctctaaagagacaccatgaccacagcaattcttataaaggaaaacatttaattgaggctggcttagagttcagagttttcatccactatcatcatggtgggaaacattgaggaacgcaggcagccatggcactggagaggtgactgagagttctatttctggatcctcaggcagcaggaagagaccagtgacccactaggccgggcttgagcttctgaaacctcaaagcctactctcagtgatacacttcctcctaatagtgtcactccctgtaagcctatgggagccatcttctttcaaaccacattggctcagcagataaaagcacctgctgtataaccctgacaccctaacttcactcttggaaatccatgtgaaaagccagatgcagtggctctagtcactagtggctctagtctgtaactccacactcttatggaagacgggaggcagggacagaatcagctggaaagccccggggcacagcacagagacacaaacgacaagacacatcctgtgtcaaacagcagcaatgcaaggtgggaagggagaattgactgagaccctgttctctctctctctctctctctctctctctctctctctctctctctctctcatctcaattatataagagctttaaaaatatcacatcttaccaaagctgactcaggaagaaacaaaaaccccaaatgtgtgtatagtcatcatatgattcaaagcagttgttcaaagtctcatctgaaattcggggctcagaggctttccatatgctattaaaactttcccagtcttaggtaaacactttcacttgttttcattaagtatggtattacactaacaaagccaaaatacaaacatgttggtgcttgcctttcatcccagcacctggggacagaatggggcagaaacaggcatatttctgcgagttcaaagccatatcctggtccacatagaaagttctagatcatctagggctacgtagtgagaccttgctgtaaaaaaaaaaaaaaaaaaaaaaaaaaaaaaaaaaaaaaggaatgtgttgtagaacattattttaagctgtgttactttttatttatgctctggaatatgtgtttaatgatgcaaagatggatttgattaaataaaattcgcctgcagtcaggaggctgggtcagcaatgaactgacaggaagtgggagggaggagccagatggagaagggtttataaggaggggcgaggagaagcacctgagcttctggaaagacacgaggaagggaggaggcgagctacttgccattcaacctctctgaggcgcagaattccacctcaacctttgaatcttgagttttttagtgggacagagatttagataggttcccttagtaactttgaacgagttggtgcctgagggaacagaattctctcaggcttctgctcttgcgacctagctgctgctgatttggacagctggggtggcgtaaaaggcagcaacaatttacaaagagaacaacaggaggtggctggagagatggctccatggttaaaagtatatattgctcttgtagaggactggagtccatttccaagcacctataatgggcagctaaaaactgtctgtaaatccagctccaggggacctaacagctctagcctttgtgggcactgtgctcataagcacacatgtctccacacaaatataacatatacataatagcaaaaatacgtctctttttaaaaccaacccaaacagaacaaaacccaaagcccaaatacatagatacaaatatcctaaaatacatatttgcagactggattcaacaaggcacagacacaaacaaaccatgacaagttggatttataacaagtaagtaactattaatgtaattaggaaaatctacagatgaaacacaccgcaagtattagaggggaagctcatacaattgttcaagaaatagagaaaatgacaagttttgatgtgaattcataattactgtgtctttactggatggtggtggcccatgtctttagtcccagcactcaggaggcagaggcaggcagacctctctaattttgaggttagcctgatctagagtcgctgcctcctgggtgctgggattaaaggtgttcaccaccaccacctagtaaagtgaattccaggatcggttccaaaacaatacagtgaaaccctgtctcgaaaaggcacaaaccaaaaaccgacgaagcaaacaaaaagtgtctttaatgtaagagactgcctgcatagtgactggacccccatcctacactcagggcagacaattgcttgatggggaatgaagggttgccattctaagagaaatcttgagtaagagacagatatcgcttggaggtcctaagaaattcaataagcaaaataaagtgaaatcataggattgaaaagcaggctggggcatagatcagctatagaaagcaagcttagcgtgtggtacggggtccactcattatagaggggctttatgatgttcagtcttgtcaacttgacagaatctagaatcacccggtagtcaagcctctgggggtgacacgagggggtttctagattaggttgattcagatagtaagcctcacatgaaatgtgggcagaacagttttatggaggtgggacagggcatccttactaaacaatgaaagagagaagtgaggtgatcaccatcgttcatctccctctgctttctggcagtggccacagtgtgaccacatgttgctgccgtgtacttcctgccacgatgagcggaaccctcacactgtgaggaaataatgttttactctcttaagttgctatcatagggctttctgtcccagcagaagaataacaaattcagagaggcagagaaaacacagaatgcatttctgcagaatatataaatggatacaggatgctgatttaataggaaaacttaatattcctcattatgtcattttgaatcattgcaatccccataaaacaatctccaaagaatctttcatgtaatagctgataacctattttcaaatttatgtgactgtgtccaggtccctgggtgaataagacttctggccatggaatggaggaccttcccgggagagatccaaggtcatgacattatagcactggaatgtaggatgccgcaataggcatactcatcaatggaagagaccaggacactaagcccagaaacagacccaagtccacactgaagatctgtgggggacagacattgtatgtccaaccaattaagaaaaatagggacgatttaataagtggtgctgatctaaaaatgtacctaggaactggagagatggctcaggggtcaagagcactgtctattcttctgaaggactggcatgagaatcttagcatctacacagtgccccacaatgtctttaattccagttccaaaggtatccaaaggtacccccttttggcctccttgggaactgcacacatatggtgcacagttacacatgcaggcaaaacacccatatgcataaaatctcaaaaaagtttcaaaaaatagatctagattacatggaaaaagaaactgaatggccagtatcactttggaaaatacccatctccactggaattaagaagtcaccaaagaacaaaattatagcaactggaacatctcagccaggtttatgtgcagtcccagaaatggcaatgctccatttcataaaatagcagaaatgttctgataagccaactagagtgggttggcctcacagaagtgtgagtgtgggaggaactaagaataaaacgtgaattggtcgtttggaatctctaagacgggaacagggaaatcgatggaaaacaacagacagaccacctcacgtcagctccagttattttttgactatctctgagctcagtaaccgcttgggtttggtctggtaaaatggggatgttatcatgagcatctccgtttctattcatcgagtttggcctggctcaggaactcactccaaaacaagagcctcccatgaattctattaaacaaacatggtaaacaaaaggttaatggaagaaagaactcgggcagggaagaagtcggtccatacaagacacctgccaaaatagctaacgatgaaacagtttaaaattcatttggttaaatttcaggaaatctatcacttattttcctccatcaccttttgaatctagggattcacgcatgtctaacatcaagctataccctctggtcccccaaattcatcctttgaaagaatattatggctgggtacatagctcagttatttaagtgcttgccttgcaagcagcaggagaatgcacacaatgaaaaccctggcacggtggttcctgcgtccaaccacattaaagggtatacattagaggtcactggatggttaaccttactacttgcgaagttccaggttagtgagaaaacctgtctcaaaataaaagtagacagtggttgggcgtggtggcacttgtttttaatcccaggactttggaggcaggggcagatggatctctgtgagtttgagaccaggctggtctccacagtgattttcaccccatccagggctacacagcaagacctgtctctaaataaatagttaactaagcaaattaaataaaggtggacaatgccttaggcacaacaacacaaacttttcattctctaaatcaatactttatatgagaattacatttccttacatttatatgactttcctattttacctttcccaaatcactctgcttcagctcctacacacacacacacacacacacacagtgagctcgagagagaatattatttaaaagtacaattctgatattctgtgaagccctgagaaaaaaataacatctttttccaccaatatggaattggatgttagcactcctttactcattgataagaccaggggtgacttattgtagcctgggagtccaatcatacctttcagtaaatacatttttatcatcatgtaatcacgccctgagtgctgtcctctctcagtaaatacagcaagattttattgctaggaaacatctaaaatatattcgctatctggccctttagataccattggcgacttctctgtgtccaagacaaaacaaaacaaaaatccaatagagctcacaaattccctacgttcacaggcatccttaatgctctcagactctcatcggtgattcatagttagcttatgctgagcgctctaaatgtaagactgcattcaacccacaaaacgagttatctttactgtgaaaagaaggcttacaaagttgttgttgttctttttttttttttttttttttttggtttttcgagacagggtttctctgtgtagctttggagcctatcctggcactctctctggagaccaggctggtctcgaactcacagagatccgcctgcctctgcctcccgagtgatgggattaaaggtgtgcgccaacaacgcccagtttaggcttacaaagttatcagaacacaatgcttttgcttcttctcactcatttgtgccattggctactcttttttatatttaattttaattaattaagattttttaaaatgtgtactgtgttttgcccgccatacacatgcaatgtccgcggaggacagaagagggcgccaaatcctgtggcactcagttgtaagcaggcagcgggctggaaacggaagcagggtcctctggaagagcagccagtgcctgtaaccactgaaccgcctgtaaccaccgaaccgcctgtaaccaccgaaccgcctgtaaccaccgaaccatatttccgggcccctgtgttcgatttttaattcattctttaagcagaatttaactatttagcctaagtttgctttgccttttggccctctgagtgcggggctcactgtgcaccaacacgccattctagggccacccgtcttccttcacaagtcacatgacataagagaccctccccttctcattctaaaaacacaaacaaacaaacaaaaactttacaattgtttgatttcttgttggtcgtgttaaatgttaatttgggggataatacttatttttatagaccatattcgaagaatatgatttttctggtttaaggtgcattttaacccgcgttgaaacttaaaatatattgatattcctttctagctggagcttactgaatactgactaacaacaaaaaccaccaaacctgcattaaggatctctcagtgaagggaccagcttcccttttggcagccataatggccgaacacgtgcttctatgaccttgtcttagacactagaaagtcagatgcctgcctcatgataaggaaataatcagaagttagtcactagaaagtcagatgcctgtctcgtgacaaggaaccaatcgaaagttagttagtcactagaaagtcagatgcctgcctcgtgacaaggaaccaatcagaagttagctggtggcgctatgctttacgaccctgggtgtgctttacagacaagcgcacagcaatgacgtagagagcatagcaaccaccctgggagggcctatgggccataacatccagttgaccaatcaacacagggcaagccgtccaagcctggaggcacaccaatcatgagcctgtgcgtacctctagacactccccttacactgtcctataagatctcttgggagaccctaggagccatccgccatggtgggtgggtgaaagacccgagctaacatggggttagctcgttaagttacaataaagcctcgtgcagtttgcagcaagctctcgaatctgcctggtgattggggtgaccgcgaacgtggcctgggaccccggatacttgagttttcctggggtctaacatcaggactttataacatcttcagtctctaaatcaatacttgggaataaatctcgttacgtttatgcagcatttctagtttagtaaatacactctctagaaccactctgcttcaatttcttaaaataagatggaagtaaaatgctccttcctagtcatctctggttctgctttgggggaggaacaaggatacagctccagggagcacttaagaattcatgggggcgggggagggaggagcagggcatcaatccccagcaggaaaaaaatggggggggggcaaggggcggatatgctcaaaatatgctttcatataaatggccttacatatgtaagcgtgtatacctatcatcccaccatctatctacatctatctacctatctatctatccatccatccatctgtgtaactttttttttttttttttttttatgatctaaggcagcaacgtgagggttaccactgccctcctgcagaaccccgtgttgcagagggctgccggttccccgtctctaaagactcccaggcgaactcaggtcatcagctggggagctggggagctggggaccaggcggggatctgcaaggccagtggccgggtatgcagctttctacctccacactgccgaggcgcagcagctcaaccaccacagcagcacggccactgcccgggccgacatggcgccaactccacctctgagcaaccgcctctgcagcgccacccgggttagcacgctccggggtcctggtcggctcctgcacgcgcagagcgggagagagtgcgtgcgcgtgcgcacgggacatgaggaagtctcccagggcgcccggaaagttagcaatgggtgaactcttaaacccaattttcagtaaaagctgcaccttgaaaaatcagttggcacgataaaagagaaaatatagatgatttccccgacccccatatcgtcctatatagcacaaactggccacaagctctgactagctgaggatgaccttgaactcaggaactgaagcagaaaccggggaggattgcagcttagtggctagctcccccgacggcttgctcaggactacctgcccagggctggcaccatccacaatgagctgtgtcctcttcaatccgttaatccaggaaatgttccacagacttacacacacaggtccatctgacaacttcctcaattggaagttcctcttccagcacagtatgtatgagactctcaaataattgaccaaacattacatctaattttaaaaacagaacaacatcatttttcttattttcaagggggggaatggacagaaatgaataatgacgtgtgtgttcctgcaattaaaaaccaaatacatatgacagcattattgcttgagacaaactctattatcatgtagcattgtttgtttacttgttgaaggctgcagctgtatcttcattcttttctattgtcactataagcaggaaacacaactcagtgttactagcaatgtgtacccctctgacactgaaacagtcactaaaaagaatttggggaggagtacagcagagttagtgagtttattgattaaacataatgacacaatccttttgaagacagtccagggaggaataaatccaatagctacatgtgatccacaaataaagtttagtattagagaaagtatgggctggtgtatttttcttatccattgaagtctatccatgaagaaactattttgaaagatgttaatcccaaagatgggaggagaaagaccacctacccaaagcatcaggactaaattaattaaagaaagctttatttttgtgtgtgtgtacataggctgcctccagctaaggcagggtttgaaaggtcagcactggacataaggaagacaaggattgtattacagttcgggggtaggaggcttccaaacgggggatttggtgggcaaactcattaagattagaggagctgaacataagcatagcaagttagccctgacaacctcctgaaaggaagacatgattgcaaggtgggcataacaacaggtggtcacaacaaggcagtcataggtggtcaaaataaccttttggaacaaaggcagggttgcaaaaataattatacttttgtcacaaagtcatggttgctgtttcctggaacaggcagtacagaaccatttgtagttaaggttacaggtgggaaatagcccaatccttcacaaacagaggtttaatcataatcaggaatgaacctagtttgtctttactgtaagatagctttgacttttaagcctaagatacaggcaggatgagtcattaaagatacattgtgttggcttgcagatggagaagggagtgccagtagagataaaacactgatcaaagggatcctgactatttgtgacataggttggacttaaggcatacatagttcattagccatgtaatcatcgcatttgtagagctcagaaatggaagtgctagtacctctggttaaagtggaatcctgggtgtcagctgaaagataagtgagaagggaagacagacaaggtcatgagggacctcagacagtataacacctttacttgggaggaaaacctgcagaggagctcctattggggtcagagcccccagtctgtttataagctgggattgttacagggcaggaagtgggcaggaggaggtggaggggagtgtagaaaggtttcctttctttatccttaaagaggctgttggtaggactaccaagtgagtagttaagaatgttagatgattaagaaatctccagtcattaacagggtatggggtggggtgtgtggctggaatctagggaaacaaatgaccttagttctttctatagtgctaactgctgtggtttcaaggaaattgacaccatgtaacccaaatggaggaacttttcaaatggcatggccatttctaaaatagccatcaaggggcagatatcagaaccaggagaacggaagtggaagaacatttttagaacttccgccagcgttcttgcttcactgtgtcacccgtgcccaacagtcttggtacgtagtaggctctcaatggctaatgataacacagtctaacaggaacggcaaacatggtgattccggctcagagtctaagaagacaccgacctggctagtatgtgaataagagaagtagcaaatgctaagctggctttatggcccctcggagaccatgacagtatacccacatcaggagacagtgcgcagaatgatcccattccatttctgtttgtaatagtgggcatcaaacccactaattgcttattagcatgtgctagtaagcaatcaccacgccataccagtgagctacatccccagttctttattcctagtgttttttcaaagcagtttttatccaaactttatgtcacagttaatttgggttgcagtggaaacattagatcagggctagagacatgtggctcagcaattaagagcccttgctgctcttccagaggatgcggggatgctcttctcagcacctatcagatggctcaccatcgcctgttactcgagctccaggggatctgacgccctcttctggccttcatgagcatgtgcgcgcgcgcgcgcgcacgcgcacacacacacatacacacacacacacacacacacacacacacacacacacacacacacacacacacacacacacacacacgaacgaaaaacccacttcagacagacattaggcatactctgaaatcagcgacaatggaaactctgagagcagaacacagaggaagtccacaggctaaccgaatctgcaaacaagatgcctacggtgccatttcaaacttcatttgagcaagttaagccctgtataaaagtctgaaggcctggagagcataactcagtggttgagtagtggcctcagattacaaggattggatttgatctccaacacttcaagaggggaaaagcaggctgtgggggggaggggcggtagaggggggaggggcggtagagggagagaaattgttttgtagaaaggatgtattttattttataaaatacgttgtggggatctaaaagaaaacaggcgcattacggatataacgtggctaactgactcatctctgcgtactgtaaaatgataagttaggacttctctgcatttcctaaatcctctactttctctgcttttgagtctgcacttctagtcctgtttttagttctaaatgtattcggctccgttccagcccccgtgcgtttttaaatccccgtttatattttacgagggtatttcgctccctaacaaaccaagtctttcaactcagaaaacaaaactggctttctcagacccaaacccgtagaccatgacatcatggcgccgcgcctcgatggccgcctcgcggcacggcatgctgggagttgtagtcccacacccctcacggccctcacggccctcacgtccctccgcgcctctggagtttgaatgcccctggaggggctggtgggcggggcgcagagggcggagctctcctagccccgcccctccgccctccgctctcgcgcggttctcggcggagccgcgcgccaggccggagaaggggtgtggcctgggccctggggtggcggcagttgaggccgcggcgcctgcgggcggtgctgcggctccggcctgcgcgaagtggtcccgccctgagcggcgcggcggcggcggcggcggcggcggcggcggagcgcgggcgggcctggcgggagggtggcggcccgcggggcgggggcggggccggcctctggctccttcttcctccgcatgtggctggcggcggcgcagcagttgggttcacgctcgcttcgcccgccgcgtctcgtcccggcgctcgtggcctgagcggagggagccatgtcgatctccgagagcaacccggcggccgcctccctgcccaacggcgactgcggccgccccagggcgccgcccggagggaaccgggtgacggtggtgctgggcgcgcagtggggcgacgagggcaaagggaaggtggtggatctgctggcgcaggacgccgacatcgtgtgccgctgccaggtgaggggagccgggccctggcggggacgcccggcgcggggacgtgtcaccttgaggcgcgcccctggggctgggagctgcgggggaccccgtcccggagccccgggtgacgctccgggtggctctggcggagcctggagggtgcgcgacgctggagctgccttttgggatctggggacggcactggcggttcgctgcggggcggagtggagggagctaccgcccgaggcctgctcccttctccggctgtgacccggtgaggacccggcgaggcccacccaccctggcggccaagggagggtcctttttccgaaattcccagaaatggagggtcacccctgccccacctgctgcaggccccgggcacgcagagcctctcctcctgccatccactttgttgacatcaggttccgctacggagctttgggactgttggggtccactttctttctttctctctctttttttttttaaattcttatttgtatcccataaattaatatttacgggagatctcatgggaccctaaagaaggaatccctactctgttgaaaagtgtgagacaagtagctacagagatttcaaattggatatttagaaaattttgcagtgtttcggcaacataaaaagttgactttcgggaaatcgagtgcttcctacccggacacacgtggttttcagtgttagctttttttttttttttccttcttcttctttttcttcttccctatttgtcgtttgctttgaagcagcctagaggcaaggcctttgtgaaggctctcagaaaactgtctcctagtttcagaattcaaaatagatgagcaatacccatgttcaaaacaagatgtagtgtttgcagttaacggcggcatgtttaggttgtaagcattttttttttcctgaaggtatgtggttttgtgtgttgatatgcaggcggtttacgttagtcaagggacctggtgggaagctttctacctaaaattgaatcccatgcagaagcaggtctgtgcaaagctagatactttgacttgggttatcttcctgtgtattgcctgcagacacctaccctgtctcttaagtcgagctagccatgggagcagctactgccttagcacccattattccttcccgggtttctgtccctgcaccttgtctggtagcatgcatatttaacagtgctctcaaaggtgtcggtatggacccctgactcgcactgcctgccataggaaatgctccaaagcacagccttcaccatttacttttaaagtcagatcttgtgtgctgaactagagacttagaaaagtgcctaaactcttgctgaatagaagggtgggtttgaggcctgcttgactttttacttagaaatagttcacaggtccagtttcattgtatattctgagcccctgtagccattgtagcatttatccaaaaggttctcagtataactacctttaaaaggttataggatcagtttgtagactgaaggtgttactttgttaccaagactgacctgatgcctttggaatgtccggagaagtaattgtggagaagcaagccatgcttggcttccaagtgttagctgaggctagtggagaagacaaatacgtgatcagtcagacttcccacacttataaacttacttactacttatataatccttacatttttttctatatgttaattaagtatacagtcaaacatttattaataaacatcagttctctagagtgttttttatatatggatacgtaaatcaatatataaaatgtatccatacttcaattagaatcacaaaataattctgtcacatatgaaatgtcattttaaagggaggaaggttatggctgatgtttcttctaactactatacattttaataaataatataccctttggggggggaaataggtgcaaagctattgacatctcatcattggagcacttaaggcctgtcttccaattcaggatcatacttatttataaatgtgtaggtcctccaggttgataaatatgtctgtctataggacgtgaaccaaagaatggccattactgctgtgttgcctttagttttagatcaatatgggttttttgtttgtttgcttttgtttttttttttggaaaggagaatcataagtagaggactggctgcagactgatgattcatccaggaaacacctattttgtatctacaggacaacacttagctctgcaatggaaatgccagaatgtctaagcttgtgtccacaagaaactcctagtctaggaaaccactgctgtgtaaacggatttgttgccagggcagcgttgaggaaggtggtagtgtgtggagacagaacagcacagaagtagcttgttagtaaacctattacacttctcccccagtaagacactctatttgctttctttattttgttgagtagcaactgagtttgtaccagccttatttaatggtctgagagaaaggcaggctggtgatctcggttaccctggcagccatggcttgccaatgatcaggtaaaactagatgctggaatttggcacttagagtccaaacttcttcactaagaccttcaaggcaatgctgttccctgctttcattgtgagttgttccataatgggaattaaaggtatgaaacaaaacccgaggctgtcatcattttcacatttgtgtgtctgaacctaaagtaaccataatggtgaaaggataagtggatgctttcaggtttgcaaagattgcccaagcacttggatgtcattgctaaaaagtaatgcagatgcctttatgtattttcttttcctagctagtgtatctggctatgatgaatagtttaatcaatgtactagtagtaacttaatagtcagcttttggtaccaccagctaattgaagttagtgtttaaaagggttgacaggtgcattagatttagtgaaactgttcacctggaaaagtaaagcttcagtaccaagaaagtatcactgatagtacttattgactcagactgccaggttcttaagttggaacactagacaagaaacctttttggtttctggaacagttcaagggcatggggtctgaggcattgtgtctttttgctctaatctatagtggaaaccccattccttcactcattttgagccctgttgtataatagtgtccatgtattcaaacaataaagacatagagtcctaaggggtctgagaagtgcccaagggactttgcatgaaattgttagcccttgacacttgggcttttgctgttgtaaaagaagataccattgttttgtgttcataacaccccaagaggttgccttcatctctgtcacttcgggaactcagaggtttaaaaagaggggagtaacttgagggattagaaggcttgatagcaaactaagctaagagtggagtccttttgcagacttgatttcatttcctttcagtccttgtgtcccattccttgtccatgcccccttcccctccccttttaacccccctaggaccattagaattcaaaattagaaacttagatatttgtaaaagtatttgtaaaattggtcttggtggcctttgtttttaaagagcatagaaagaaaaaaaatatccaaatcatttgtcttctgactttttaaaatccaattaggaagaaagggtgttcattgaaagtctgagaacaagatgactaagtattgttattgcatccctgtatcctgcagtgccatgctttaaagtattgtactggatgccatagaaatgatgttaaaattcagcatttaatcttatttgtatttttactgctagagcaagatgtgaactccaagagcaaggggtatacttactatgttgtaatggacttgtttcctgaatcatgtgtgttctttgttacagacaatggaaagaaactgtaataagcaaagtgaagatttgtctggtgtgtgtgtatgtgtgtgtggtgggggaggggatggccagggctgcttcagggatctatctcagcagcattcatggattttagcacttcaaatcctggttttctgaagctaattggctcagattgggttactgtatttgtctagatcaatactgtggccagggcatgtttacttccatttgtaaagtaaggggagagagggagccgaacacaatcttaaagctaacctggagttaattttgtatacaagacagatgaaaacatccagaaaattcaggattgttcttcataaaatatttttaacactctaatgtactgtagacctctttttttttggaacaaatattgtttggagtcaaattattatttcaagtctagaaaaaaaaaaacagtggaaattagctgtgtatttttgtaaaggccaaaaagggttcactagaaactttgcttttttgctttgaaaacatgaagtttttgttctgaggtttttttgtttttgtttgttttgctataatatttagttattgcaatttaaaaaatacttattcttgcttgttttttgagtcagagtcttattctgtggctcaggctgacctggaatttaatgatctcgtctcagccccctgaatactgggattgcaggcttttgtcataatgcttgactaagatgttattttattctttttagatttgcttattttatgaatatgtgtttgtttgcatgtatagctgtgtaccactcgtcgtctttctggtacctgtgaaggtcagaagagggcattggatcccttaaaactggagttgtatatggttgtgagctgccatgtgggtacagagaacaagtactcctaactgctgggcctccagctgccttagttacttttttattgctgtgataaaataccgtgactaaggcaacttgtaaaagaaagcatctaatttggtttatggtttcagagttcattacttttcaattaagcctcaggcaaattcttaggcaaagcagccatagtctttgccaaaatttcactagaatgcttgctagcccagttgctactattgtttacctcttgggctgggcctccacatagagtctgtatagctctcaacaggatcctactaggatgactcattaagctctgctcacagcatccgactgtttcctagtccagagtctcaaattcttccacattcttccaaaaaaagcacatggtctgttacagcaatagtttacttcctggtaccaacttctgtctttgttacttttctattgccatgatcaaagcatcttaaacaagaaaatgtttaatttgtcttacggttttagaggattggagttcataatggcagaatgaaggaccagctgagagctcacatattgatcctcatcatgaagcagagaattataagaatcacactctattttgacctcaaagtttgcctcagtgacatatcttcttcaacaaggccacacctcccaatctttcccaaacagttctaactgggtaccaagtattcaaacatataagccttgggagccattctcattcaaagtaccacaccagcatctagatatttaacttaatgtaagaatagcaatcaaagaagactggtaacatgaatctattagtggatatttactatgtgagatgtttgctgataagtagtctttggcttttctttcatttatttattgtatagttaacttgcatttattcttggcatttactataaaatgtcatgtatggcagtcaaatttaggattttctgaaaaactttgcacatactatatagtaaagtacttttgggctcatactacctcttttttcttcattttttttttgggagacaaagtagagcacgttcaaggttggtgtggccataaacaagttggtatatttcatttgaggttcatctgggcatgtagcacacaaagttgcgtgagaagtgtctccatctcctcttatagtttgcagtgggagggtgaggtcatgggcagccttgctcctatttagaaactcattgttttactgtctgctaaagtatttgacttcttcatttgatcagtatctgtgtgtgaggacagttgcctgagcttgcaagccaatgaattttgcattttataaacaatacataaatattttaggttagcatacaaatagacactttaaatctgaatctttacctgttgtatttaacatctaatttttgtaatttgatatttgacattttactatttattgaccatgtaggcataaactttagtaatcttcccatggctctcaatgataattctaaggattaaggattccttggtccagtgtcttatagatagagaaaattgtagggatctgtcactaactaaaggctcaagactgacttgtaaactaaggtcttaggacagtactgggagctacctgggagcacattgtaaattaaattaaatccatctaagaatgcaaatccagatccggaggcgcttggcactcaaagaacaatcggtgttacctgagcatttatagcagtttagaataactgactctcaccgtaggatgggtgtgtgtgtgtgtgtgtgtgtgtgtgtgtgtctgtgtgtctgtgtgtctgtgtgtgtgtgtgtgtgtgtgtgtgtgtgtgtgtgtgtctgtgtgtgtgtctgtgtgtctgtgtgtgtctgtgtgtgtaaattatcatgaatagttacagtcatgatacatgtcctatatagggccaaagacaccttaacaaactagatgagttgagcttttttaattctaccctttgtctcataaaaaggaatgcaaattcctgccttccagaaatctgaattcaccagtttcttgatcctttcggagtaatcattcaagtgtgttatagcagggaaagaaccaaatgtttataatttttttagtaacttgattatgtgtgtgtgtgtgtgtgtgtgtgtgtgtgtgtgtgtgtgtgtgtgtgtgaaacatttgggtttccttgggttatattgacatcgtagtatgaattagttaaactatttactatatttattatcaggcccaatttcctcctttattctgtttcagggaggaaataatgctggccacacagttgttgtagattctgtggaatatgactttcatcttttacctagtggaataattaacccaaacgttactgccttcattggtgagtgtttaaactgactccttggggacaactgtggtatatttttgttataaaactgacttcattttcactaaccagatagttttgatgggtcactaattttgaccatgatactgtgtaggacggagcctctgactgctgactacccttccgggccttttgcagtagagttcccaggatgttcactttgcgaacatctctgagcattgtagttttcattctgtaaagaagctctgatcaccaagtcagttttccaaagacttttcagctctgactatgaaaatatatatttcattctgaacccttacacatgtaatctgatgatttgtattctgttgtttaaaaatgttcatggcacactaaattcgttttgtggccacagcagagtgtgattctgaaagacactggtccagaccatgtgttaacttctttcagaagcactgttatcttctttcggaacatggtccacttgtttcaaagatattccaggttgttttcagtgtaattttagtgttttatatcccctatcatttgtatatattataaactttgaataatttttgtggtgattccttaataaaatgcaatgtcctgttaatgaatgtaacttgttcttctgttcaaaatggttattatagatgtctacattttaacatttatatgtatgtctatattataattacaggtgtttaaggtggaggattgtttgtttcttttaggaaatggagtggtaattcatcttcctggattgttcgaagaagctgagaaaaatgttcaaaagggaaaaggtatgaatgagtgagtctaaatgtaatgtgttatttttgttaaatgtgttattaccattttttttcatcccattgactaatcttgcaatggctcccttttctgtctgactcatcacattgaatgataatgagatatctgcacctcacttgctgaatccatttattcagtttctttgtaattcttcccttagactgtttcctaaaccaacttagaatacatgtttacgtgtcaaaaacaactgtagggtagcttgctagtattggtttttccttgagtacagcaccttaagtgctctgctgaagaggccaccccttagtctataaagaatcaaactagatgttgtcaaaggtaacaacagattcttatttatgtatttatgtttctttgtgtagccttatctgtcctggaagtagcactagaccgggctggccttgaactcatagagatctgcctgcctctgcctcctgagtgctgggattagaggtgtgtgccaccactgtccagctttatgtttttttttaatgtttgaaacttttgtgctggggattgaagctgggtgcctgcatatgatgggcaaatgctatatcactggacaacttttctagctcagttttaatacccagatgttagttttgaaagcagtttatcctacgaacacatgtaacttactaatgtactaattaataaaggaaactacctgtttggatttgtctattcctccaacagtcatttccccctcatggtatgaaagctcacagcccctactcttggtaactcatagttacatggggaggtgcatctatttcattaccattccatatcctaagtgtagtaatctataagactttggagaaatcattattttgcccagttagatttctttataactctttcgggagggtgggtaccattattaaaaccagttctctcctcttgagttttccccatgctctgtacctgatccccacccctatgtccaggaaaagattttcctgctgttctttttgggggttcttaggagtattttatgtgagtgtgactgccttgagacatttagaacataatatttggagataagagcatgaatgagcttgtatgttaggaccagtgacaaacttgataagctcaatgcttccatgcagaagaaaagatacaaacatgagtgcttcagtcaaaacactcttataaaacattctattcataaagaaattaagtcttaaaaatggttacacaaaatgtttgataaagtgtatcttttctctcctaggtctggatggctgggaaaaaaggcttatcatatcagacagagctcatattggtatggaggccatattgtatttatttataactgccttttaatcgaatgtatcaagtgaaagcatttagaaatgaattatttcttatgtttgtttatggactgtttcgaggataaaatacataagatgttgattttttttttgtttgtttgtttgatttgacaaggactagattgaagtacacctatttctgaagactagggtaactaagctgatgagtagcataagcagtattgtgtgtcatctttagtcattaaaaataagtggtagcaaaatacaaagcatttatttgtacatgttagcattcctgtaagagtgcatttgacctgagtcaggtttttaagatgactgctgtgatgcgatgaattgctgctcttttaaaattaatttcatctgtcaccagtagtgggttttcttcttggttaccattcctgaaccaataggattaatgagcagtgacatgattagagatgataacccgaaaagagaaagagggggtataaatcaatagagaattttggtatggccctgaatctattcaaatatgtttatgtcctgagtagctgcaaaatcttagcattgttctcttctttaaaaggtctcaatcaaaatggaaatcaagtaacagtgtcactaaaaaaaaacagcctcgaatctgagctttgtgcatcacctcagtaactctaaaatagtggcaggatggctcagccagtgaaagtgcttgccttgtgagcctgatgacccgagacccgagttcttgggcatccgtgcccatacatgcatgttacacaagcagtaataaagtaaaagtaaaagaacttttttgaggaaaactgtactgaattaacatacagtttttaatatgaatgtcctttttttccattacattgttcaccatgaagttcttataaagtctgagaagagcaattctgtgctatcattgtaagacatttttatatcaatagcatactgtgtggtttgtttttagtgggatgcttatccttattctgaacttggtatgagtagatacaacatttagaatactttgatattttcagaaactcaaagtaggattatctacacaaatgctttaagttcatttctttgtctgagaatacaggttgcatatttgctgaattatttcagtgctttagactgccagggaagaaaaggaagggtgctgggggtgagatggtgcttagtgtcataaagacccttctttctttttggctttgaatcaaagtcttgctaagttgtcaggctggactggaactcactataatattccaatctggccgcaagtatgtgatcttctctcacccttctgtcttaacagtctaccattggataaaatctcagaaggttcttagactagcatgcctccatttgcttgtccagccttttttgttgttgtcatataatccatgtcaatataatggtataaacttcagtgtcaatatttttgcttaaaagaaattttaagatgataaagatgctgtgcaatttgaaaaatagttgagcagtggctgaagagacagctcagtggcttaggagtattaccttgccgagagccagattagattgtgagcactcgcatgttggctcacaaccatctggaactccacttctggggatttgttgctgtcttcttacctctgggtactattcacacatgtaggcaaaacacataaagtaaaatgactaaatctaagagatttgtttttgtttttcaaaacagggtttctctgtgtagccctggctgccctggaacctgctctgtggaccaggctggcctcaaactcagagtcctttgcctcctgagtgctgggattaaaggtgtgtgccaccaccacttcatggctaaattttttttttattaattaaaaaaattaagcaacttaatcatcttttgtcctgccctactgacatagttggtaataagagagatgtttattcagagtagcctgagaaatgaataaatggggtaaatactgtaagcgtctcaagtacagagttgctggtgtctgtcttttattcatgtatccattacctgtgctagacatggtctcagaccatggagattcaagagtgttagaaagacaatatttaaaaaaatcctttagtgaagcttatcgtatagtagtgaacacattatgtaagacaaatatataatgaatgtgtcatggcacagcattgtgttaataaagctcaaatatagtgctggtggtatagttcagtggtagacagtgctgggtaattaccaatatcaaatacttagataagtaaaactcagccaaatttacctatatcaatacttttacagtggtgctaatgaaactgctaagggtatacagttacctttcatttaaaaaacaattagactaaattctcaaggtagtttttcttttcttcaatgtctagacttctgtagaaaacaaaagcaatattcaaaacaacttcagagagagtaatcaaaagtaattggaaggcattaaggttctacaccattaaagtcattgttctaattatactaatagcttcctggggcctaggagagcagtagctttgtgtcagggtactaaactaattttttgataatacacttcaactgctttctgtcaaacatttatttgtggttttctagttgccttttaaacttttctgttaatggaaaataagaatttaaatgcagatgctttttatgcagaagaaattgtatggcatattctaatatttcaattgtattataactgacttgctaagttagtgtttattaaaacaactcttaagaataactctggtccctgaaataattttgaaaggctactgtctgggcaacaggataggaacatggtaacaaactaatcatatgagagcagtttgaagtacaacatgatacacatgtataccacatgatacaacattcataaaagcatgtaatatactcaatgataaaggcttctaagcgcctggaaaaattgctgtggtgacttttctgagccattatctgtaacctttgatcaaaggtgaccacagctcatacttctcttgtagattagttctgtcatttggaactttatttaaaattacagtttgtactatcttttgcatctggcctacactgaacattctgcctataattgttgcaattctcttgttattgctacttgaagcaaaaggtttttctttttaaaaaattgttacctattatgaatatgccaaaacttttatcccctttaccattggtgaaaattgattgagtttttccaatattggtttattaaaaatagcattattttgacatcctatagttgttatttgctatgtaatattccagtataattttaaggatactcttttaccgacttgtgtggtactgagacatgtattgattcactcactgcaaattgagcttctgtagtgtaactagtgtacagaaatttcaaagctctcaccaggcatgccggagaagactggtggccatagaaagctcttgccatgcagggcataggagataggagaacaacactttctgcatagctttgcaggctaaggcttgtgagagggcagtcagtgtctgtccaggttttatcacatttttctagtttctatgtaactaatgtatatcttctaatgctggtggtggtgcacccctttaatcccagtacttgggaggcagaggcaggggatctttgagtttgaggccagcctggtctacagaatgagttccaggacagccagggctacacagagaaactctgtcttgaaacagacatgctgccactaattctgagaactcagtcattctacttagcaatttagttggaagtaacaacataattggtggaaagaaatcatgacataatatgataaaatcattgaattgtatacctaaaactggtgagttttaaggtctgttaattataaagttgtctaaaaaaagtaagtaaactttagttagaagttgagaaaccaaaaccataggcttgcatgtctgtgagctgtttatgtagtgagtcaatagatatttgagtacttactagtacagaaattcactagcaaactgacattgtcctaggactcagagtattgtgtaaggggtatgagtgtgccccggccctcggggctccagtaattcatgaggtggattaagcctgaaaataatggttgggaaagaagagccagaccaagcaggatctttgtcactgtctcctttattgattattacaaggggtttttaatagagaaaggaggaagcagagaaaaaggaggtgggggaaggaatgaatgttaattgctctcaggcaggtatccggaatctcaggaataggtgttagttgcttctcaggccaggtcccggaacctgaggggtgggatgctagactagctggcggctagctaggcatggggggtcgccaaggctggcttctgacatgagtgtgcatataggtgcttgtaggtacactgcatagaagtctatagttgtagccaaggactgcaagggatgctgatgtgagcacaagagtgtttaccatgtaagtagtttttcctaagagttgtttcaaagacaaggattcgataagttgtttgtgtcttggcaagaaattttgaatgcattaaagaatttggattccatgtccaagagtggaaagtggcacaggttagagcatagttgtagtgaaaggtaatggatgttcgggactagggaggaagaggtgtcaacctaatccctagagttcagaacttgaagatgcagaagaaaaaaaaaccatattatctttggctgcgtgttgatagcacacccctttaatcccagcactcaggaggcagaggcaggcagatctcttgagttcaagatctgcctggtctacagagtgagttctaggatggttagggctcttatgcagaaaaaccttgtcctgtcaaaaaaaaagggtacctttgtagtagttcgaactttactgaattttaggttaggatattctaaaattgcccccccccttttttttttctttttctttttcttcctctttgctttcttgaaacactaatccaggttggcttcaaacttgttgtgaccctcctgccacaacctgtttagtgctgaaatcacaagtgtaaactactattaatacttttagaaatatatcaatgtgatttgtcataaacaaggttggagggatttctagctttagtaatttgatgtagaatattttatcttgcatgttatctttgtttcaataacaactgtgatttgtttggtttctcttcagtatttgattttcaccaagcagctgatggcatccaggaacagcagagacaagaacaagcaggaaaaaagtatgatatatacatacatattttaaattttgatatagtttgaacacatctacatcgttaggtataaattctgagccagaaataaaacaaaacaaaacccagaatagatagataagaatattttacttaggtttcagagaaaactggttagattatgcaaataagcttgtaggaaattgcataaatagcagaatcatatgtaacttccttctttggaaagatctgaccgcagacttacatcttccctctgtaacttaaagcttgttttggtttgttttgaagtttgggtaccacaaaaaagggcatcggcccagtgtattcctccaaagctgctcggagtggacttcgaatgtgcgatcttgtttctgactttgatggcttctctgagaggtaacaaacttgttttttcaaaatttaaaataacaaaaacatttttaaagacaagtgcaaaattgaagcaccagtaatcagatttactttgtgacaaataactgatgatgatgtaagactatgtcctaagaagatagaatatcgttcttgaggactagttttctgtgacagcaaatgttcccagtgtggcaatactgatgtgttcaccatgtcctaggatctcatcttcgatgtttcagattcagggaccccaatagcctttccaggtcctagtaaattatttgggcacatcttcaaaactagaaatgctacaccgacctattctctatagaatggtttccttgggaaatgtagtgattgtttgcactggcaggcaactacaccaaaagggcctagagatcagttgttagtgtctagaatatcatgtagaccattcctttcatacttttatatagtagaatgtgattcaccttttctgttttcagattttagttattctgtttcttctccaactactcatgtcaccttaattatattgtcttaaacataattttttttttttttccgagatagggtttctctgtgtagctttggagcctatcctggcactcgctctggagaccaggctggcctcgaactcacagagatccacctgcctctgcctcccgagtgctgggattaaaggtgtgcaccaccaacgcccgacataaaaatgtattttaagtatataatttattcacgtttatctcctttattaaatgaaagtaacttcagtttcagagctaatattattttaagaccacttagaaggcacagaaatcacttgacttgaatgatattatctgaagtattctttaaggtagttaatgccatgatctgtatttttcaggttcaaagttctagctaaccagtacaaatctatataccctactttggagatagacattgaaggtgaattacagaaacttaaggtaatgcttttttttagctaagtgatgcgcttttaaacactaattggccaaactgacattccagttttgtgtattaactagtgaaagaacttacaagtcattcttggacatagcatgtttgtgtgatttcacagtctggtttagatgggaaaggaatggtgtgtgaaagtagctagatcataggtctcagatgcacctgcaggaacttagcttttatttgggagacagtggaaagctattggagaattctgaacagaagaaagttcagatttagattatgaggaaaccacacataactactgatgtgtagatctgtaaagaaaggacgtgtagtgacttgtaaagtcagcaggtttaggattgataaacagtttcttcagcatttgtttctgagacaaataactttactgaagaagcccagtggtgcctgctaacagaaggcttctcaatcattggtaaatgttacattgtttcctatatgcctggtggttacttctttacaagtatcaacattgttactagaactgagtaagaatctacatatcatatgtcattctggagtagttgcaggccttatgtctgcttatgattcacataaattgggtgtggtggcctatgcctgcaatcctagcacttgggaggtagaagcaggaaggtcagaagttcaagttcatcctcagcttcttactgagttggagcccagcctgggccattcttggggtggggaggggggggataagaaaaagaaacaacaagagaaacaagattttcctgagtgacatgtgttgacacataaggactttacagagtcattttagccacacagagaggactgaaatgtatggataagtaagagattaaagacgaaagggccagacagacattcattagtgggtgcaatgtatgggctcctggtaagtagcttctagaattggcattcttagtgcccagagttgaaatcaggttttattgcagtgtacgttccacagccctcagggaaattcttgtttatatttttacttgaattctgaagttaaacattgctagcatgtcatgttagtatttgatactatcaattgatggcaaattatgatgctgttactataaagaagaatgacagcactcatcactaacatttgcatgcttgccagtgtagtttgtgttctttccacattttgttgtcactctgatttgaacttgaaaattgttggttatatggattataaatgcagcttttcaaataacttaaaaatgtcaaagtgccatctaatataaacagacagttctttttattctccctgaaacctagcttatatgaagtgagtactttgctctgttcccattgaagttgatacagaacttttaaatgttatagtgcttgtgtgtgtatgttgttcaggacctcacacatgctaggtaagtactctgccctgagccacatctccagccctcctgctgctgatcactcttttctgagagaccagagcttatccagatgctgcactggggcgagcgagccccatcaccagtgccttctgctcagatttgtcagtttccactgtccgaggtcaggtagtctacactttgactgtgttataatgtattagtgcacatggaaactggtttttgtctttgtgtagggttatatggaaaggattaaaccgatggtgagagatggagtttatttcctatatgaggccctccatggaccacccaagaaaatcttggtagaaggtgcaaatgcagcattgttagatattgattttggtaagtgagatatgattcatagggagtttgactgagtccaaagtacttagatataaatattaatgttagcactaaggaggttataaatagtgcatttagcgtttgtatcaggaatgagatagcttgtcatctggtggcaaggaatactgtggcaagcacagtataagttacatttcattagaaaaatagaatcttttggattctgtgggtttggagttctgtagattgtgaattttattagttggttcatgatttattcagttcccatttctctggaactgtaaaatgataagatcaatttggggacaatcttcccctgtaaatctttaaaataaatagacattaggattaaacatgtttttgaagatctagacaaacctgtgtatgttaactcattctgtacatgaggctttctggtaggctcagcattccctccatcctcatggttaaactaagcttaccaagatgactatctccttagtcttagttgatatatataaatatatataaatctaaatgttctttcttatgctgttaacagttctgggttcatttctgtttgtctttttaatttattttttgtttatatgtgagtgttttgcctgcatgaatggctgttcactacatgatgcagagcccttggtgtcattggacccccatgtgggcactgggagtcaaacctgggtcctctggaagagcagcaagtgctgttaactgctgagccagctcttcagcttcttgacatttcattagctttggatactaactaattaagtaaagagaatgtatttctctataatagatatatttacccctttatcctgaaatatgccttctcaatctggaaagagagtgtataatttggaaagttgagtagttaagtataaaggggagaaaaatgcaccctcataattgttccggtaatttgagggttgctcttaatagagttcaaaggctgaggaagtgttgaacaccacaaaattactgttgccccagggtcctgctgcaccctaagtatgtccaccagggagtcatttgtttgaggagtcgatcaaaatgtaggtgggtttctgcataaaattcttctacaacagtgagtacgcactataagccaagttagcaactggacatactctggggttctctacagctaaaatgctgcagttaaagctctacctatctgcatttttaacctgtcacagacaaagaggatcacgcctaggacactgagctcttgagagagggcagtgacaattatggtcaagtccatcagatacagaagtaaattcatatgcatgctcttaatgtaattctgttttacagtgtatgtgtatatgtgttcaccttagtgttttttattttttcttttctattttgtaggaacttacccttttgtaacctcatcaaactgtactgttggaggtgtttgtacaggtttgggtatgccacctcaaaatgttggtgaagtatatggagttgtaaaagcttataccactagagttggtattggtgcctttcccacagagcaagacaatgtaagccgtttcttagtaatctgatttttaaagcatgaaagaaaaatcgtgttcccctgatctcaaccttaatagactcctctgcctctctcttcattcacaagggtcatttgatgtgtttgccttatcattttcaggaaaaccttataactttgcttcttggaatgattggctaggtttgtttaaatattaacaacttgctcatgagcttttcctttgttgtgaaaattacatgagaaatgtaaaaggaagaaagatgtattcatcgtgtttgttgtcgttgttcatggtttcagtccatggttactctgtggtgtgtctttgggctagtagtaagatatacatgggggcaaaagggcatggagtgggaaggctggtcccctcacctcatggcacttgggacgcagcaagtgaggacgatatgcaagggcacaccaggtcctctaacgagaccctgcctcccatagtccattcagctaggaacttagctgtagcaagctttttcatcagactcccaaataatgacacagagacttattaattatgaaagcctggccttagtttaggcttgtcccactagctcttacaatttaatctgtttttattaatctctattttgccaagtggctctttacctctccttcattctgtactggcttctccacctgcttagattcatccccctgagtttctctgcccagaagtcccatttaacctctcctgcctagctattggctgttcagctctttattaaaccagtcagtcccttaggcacattttcaaacagtgatcaaatatcctgcaacactcatgaatggattaatccactgataacattagtgtcttcatgatccagtcacttctctattgccaaatgctgaggaccaagcctgcaacacatgggcctttttctgagatcataacaacttgttcttactgatagggtctagttgtttttaagaaaagtagcacgagagggaaagacatcatgtaacagggttcaagcagggggatttttttattaggggaagggaccatagaaagggaagggggagaccagcctctgggagtaggagcatcaggagagaggagagaggaaagggggggggatggggaaggggaggagggggcagacagggaaagaaagagaggctctgtagaccaggctggtctcgaactcacagagatcctcctgcctctgctgggattaaaggcgtgtgacatcactgtccggctggcagggcccttttatcagggaaggtagtgaatgtgcacaggtggtgctcttagtggctgcagctgagggcgtgtcctgtcagaaccccaaggacaggccagtgcagatgcctgaatactaacaacctgtatataacgtaaaaagtattagcttaaaaatgtaaaaatgaaatcaaaactgaatatattccaagtaatgtcatttccatggaatttctgtctccagcttatttcatgaaagatacatatcaagagataattgtttgttttataatctagtataattccctagttatacagctttgatattttaacttacaaattctgttatacaggaaattggagagttattacaaacaaggggtagagaatttggagtaactactgggaggaaaagaagatgcggctggttggaccttgttttactcaaatacgcccatatgatcaacgggtttaccgcgtgagtcttcttcagaatctgtgtttcaggaaatagtagacggttgataaccacaggtttgattttgtagaaagtaaacttgcgagtcccctaacagaaaagcttcactcctctgcctccagaataaattcatagttttagaagtggaattagatatagaaggaagtatacaggaagagatacccaagttactttcctggatgcccagggctctaggaagaatggcagtggtgtctgactggtgtgtgtgtacagagggccgtgagatgggtaggcagggaggaggtgatggacagtgtgcacacaggaggcgacaatgctgtgtggggatggggcgcacacttagtgtctgacctggatcagacatggactcacgcgctgtgctgatgtgactggacatgctcacctttttgagtctcggtctcatcatctttaaaatcgaggtcagggtatcactgccactatgggcatttgaaagagaggtgaaatgcaggcatactgttgtgctcactgagacactcagtaaagtcgaagcattttatgtgtaagtaaatgtgtttgtatctgcattaataggctgagcttctaacaagtaaaaggagtttttttgttgtttttaaacaaacaaaacccaagatttgtgaaccagaatcccaaacctagtgttttatctaatttccacagatttccccttaaaatcctgttttcaagtcagttttcgggaaactttgatgtatcacgaagaggtccttgatgtttcctcactctgtcagtttctaaccagaagggtggaggtgatgttgagcagagtgaacagttgggaatggtagcatgtgtgggaatgggcctaatatcttgtgattatgtggaacaatgcgttctgctgtgtccctggggcacaaaatgcatccttaactctaggcggccttcccaagtcatccctcataagatagctgagcaagtgtgaagccactagtgagactgtaattactagaaagtaactgttttatgaagactgtgtgttaatacagggtcctcatccatgtggtcttctgtgtgtggcacgctttcaagtataatcctaaccagttttcagaattgctttggagcgctgagctttgcatgaattttccctttctcctgaatcagttagactgggggtcacaagtttgctgtttcaacagtgtcttttctttcaaaatcaggttggcccttaccaagttggatattttggatatgtttacagaaatcaaagttggcgttgcttacaaattagatggggaaatcatacctcatttcccaggtactttttttttggctgtgtctgaagtttataagattgctaatattatcatttaactaatgtgtaatatgtgtaatatgtaattgctacttttaagattgtctttcccaggcttaatttttttttttaaagattttatttattatgtatacaacattctgcttctatgtatatctgcacaccagaagagggcaccagatctcataacggatggttgtgagccaccatgtggttgctgggaattgaactcaggacctctggaagagcagtcagtgctcttaacccctgagccatctctccagcccgctaggcttaatttttattttactcatagtgcagatatattgacattttgttcaaaattggtattaatttcagagttgggtcacaaacatgtacttaaactcaaaagaaagatgctgcttcaaggtttcatctttttaaacttatagaatggtatgaatgcctgtagcccagctacttaggagcctcaggtaggaggcacgcttgagcccaggagttcaaagttagtttgggcaatataacaagacctgtctatggcaacataaaagtggggaagagagaaagtttgggaagaaaagacccttgagtcttgtatgctctttctcagtacatgaactcactccatccttcaagccccatgagtttttctaactgctctgtgtctgaagttaagagatgaaggagatgcctacttggaggcagtgtagttttttgaggcccatcttgtcacaggatttacttactcaggagtttagtaaatacttctagatttagaaatggagattgctgatttttcaggttagttttccttaaacaccaaggaaataccagttgaaggaatgttgacaaccttaatgaaacttggcagtctgggaagttttatgaccctgagactagatattcatgaagaataattttctgtcattttccagtttctcttacagaaaaacaggcatctgttaacattttaggatagttacttagaaactaattagtcaaatatatattatgtcctggtcgttactgctatctcaaagttttttttttagatttcttgttttaaaggttttatttacttattatgtatataacattctacttccatgtatatctgcacacctgaagagggcttcagatcttattatagatggttgtgagccaccatgtggttgctgggagttgaactcaggacctctggaagggcagtcagtgctctcttaacctctgagccatctttccagcccctcaaagctcttttaataataatataatacttcttaactttcagcgaaccaagaagtcttaaataaagtggaagttcagtataagactctcccaggatggaacacagatatatctaatgcaaggacatttaaggagctccctgtcaatgcccaaaattatgttcggtttattgaagatgagcttcaaataccaggtaaacactttttgagcggctgtctttaatttttctgttagtttgtggggttttgtttgtttggtttttggtcccatcctctctcccgtcccccatgcccatccccccaccctcataaccaaagcaacttggggaggagagagtgtatttgacctgctctttcatatcattgtttgtcattgaagaaattcaaggcaggaggaactcaggcaggacagaaagcctgtggggcaggagctgatgcagaggccatggaggagtgctgcttactggcttgctcagctactcagctgctcaggtggtctggcaccacctgaaatggactaggccttcccctatcaattgctgattaagaaaatgaccaatcttataaaggcatttttttttttaattgagtatcaccctcttctccagtgactgttgcttgtgttaggttgtcataaaactaggcagctcatttcattagcaagaaatttaaagtaatagtgaagaatgaattggtttactcatgtaggtccttgctcatgggagggcgaggcaggaggattcctgagaatgctaggttagggctatataataaaaaccctgtcaaatacaacaaaaaacacaaaccaaagaatgagaaatagatataacgcatacataaagcaagatggccagggttgggcatgatgaagttaggtggcctttctgttacgtgattgctttttcctttcattcttttgtttacactgatgggaactagagacaagaaaaagtaggtgggagatactttccacatgcaacatattatgtacttacactgtctctgttgtgttttgtttttattcatgattcatttcagacatggtttttgggtctctcccaccttgatgtcagccttagcaaacatgtatgcgaatggcttttagtcaaaagtttttgaaatataaatagctgagtcttaatgaactctatacaatactataaaggattctcctgccggtatattggggaacccaggaattctacaaataattacagctgtgaggcagagatgaccagtcattccctgaaccacctctgtactaggccactcctatggctgtgctgtgtagttcaaaattgtcaagctatttctatacatcttaatgtaaaatttatagagtagttttgatgttgcttatcttttctactaggaactcttattaaattatttatgtctctgctaatttggaccatgcttttactgtcatagtcactaggggtgaaggaattgtaaatactgtatagttacaacagcattctagtcaggttcgtctgtgctagacctttctagaagaaaataaggacaggctgctgacagaaagagcaacactgagaaaaagtagaggattgcctctttctgacatagaattcacctttattgagaacataattgagacacttataaatttaaattattcttgaatggcaatagtaattcctctgtgatgcagaaatgaaaacatacaaaattgagcacactatgtatttctgcatggcatacttacaaatcataaagactaaaaatgaagctatttcatcattttttgaaataacgtatgacaagaaatcttgtagaaaaaaacctgaagcagaaatatttgcaaccaaattttctaatggcttaaaaaaaaaatcaaatcactttgtctaaagatgacagtgtttcctgtacacttttgttgtgtttagaatacaacataaaaagtactctaacacagtttgtagttttttagttttaagcaagtttcttaatataaaggataacaaatcatgttttgtttataatatgctaaaatgattacatggaaggactctttaaggcttattcattattttatgtgtgcctgcctgcatatatatataatgtatgtgcatcgcatgcgtgcagtgcccacagagccagaagagggcactagggatcccagaataagaattgtgaatgactttgtggtaggaattgaaccaggctccactgccagagcagcaagtactttggaccactaagccatttctccagcttcccatggaagaattaaaaaaaaaattttttttaaactttatttcatgtgcattggtgtgaaggtatcagatcccctggaactggcgccaaagacagttgtgagctgccatgtgggtgctgggcattgaacccaggtcctctggaagagcagtcagtgctcttaactaagtcatttctccagcccccatggaagaattcttatcttgactaccccagaaacccttttcttttgattctcaaaatgtaccttttaatgggtatcttcttatttcaccttaaaaggtttctgttatacactaaattatctaacaggactgtacccatagttctacttcgtttgtgagatcaaagatattcagtattaattatttctgcctttaagaataatattgacttaaattcatatcaatcctgcatagtactggtaaatgacattggagcaaaacttgatactttactttttgaaactctattttttaaatacaacaggactcttctctcttcattcatcccaaagctgaatgtcacaagggacttgatgttcatctcttgttttgttttccagttaagtggattggtgtaggtaaatccagagagtccatgattcagctcttctaaggattgccagcagcgcacgagacactccttgagagggagggaaaatacttaagcatttctctattatctgcaaattcaagaataaagacatggaatgagttttaagctggcattggttgcagtctctgacagacggctgtcatggacagactggcgccctcccatccagcttctcagctggcatggccgccgcctctgttgctcctgctgctcatggtgccacagttccttcccgtgttcagtaactgtataatccctgttgtttgaaatctaaaacttccagtgcagtttttcttcattattgtcatcgtgtttgagtttttatcccaaatagatggtgagaacaattaatgcagttttgcacagatatttttacattctgatcattcagttctgtcattgtaatctttgctgttagaaaaaaaaagaaaagataggggttctgtcaacttttgtaatgctattaattctgtttaaattgtgaactgattattttctgctgagaccattgtaaaactgagctttggttgggagggggagtatgttcatgggacctttaatttgtatagaatgcagaacctagttctctctacaattatttaatacaatgaacatttaaatttagtgttcaaaaagagatgtttccctacaatagcaatcttaatgttaaaaattaattattaaaaaaatcttgtgatatttggtggatatttttctttgctttcagatacgagctcaaatgtatatctttctttttttgtttttattttttaagtatactgttatttctgagaacagtgggttggtcttcaacattgtgcctgccggtatgtctataaaatgacccataagtacccacatgaaccctaattgccaattgtcagccataattctgatcatgccttcatctttcctcccttgaaaataaagaggtattacttagcccttaggctttatattgtgctgtagattatccttccatgaactataactgtttaaattaggtgtcccttgaaattattttattataaccatcaatagctgattaaaaagaaccagatatttccagtatgttttgtgtgttgtttttcttgtgttcatagtaatgctagtgaggagggtggtgtcccatgcagtgcttgtgacaaggtaggcagagatcagtaggatcttcgggagggtcttttcactgaagtatttttattaatcatggctccagaaaaattctaaaataggagcagttttgttagactcaataagtgataaactcaggtgatcccaccagcccactgtaaccatggaacatgtgggaaaagagcagcgacaataaatcctgctccttaccatggaaactggagatctgtattcttggctataagcattgtattagtgagacacatttgcatttaagttagttgatatttatgactcactaaagctcgcctgaggattcagaaagcaaagtcagccacaagccttagaagccaggcacacacctttaatctcagcagccagaagataggaggtggtgctatacacctttaatcaagactctggattaagaggtagatagatctctctgagttcaaggccacccagggattaatgagattgaatcagtctaaaagagtaacagatcacacgccttcatcccagcactagtggggtataaagatagaatcagggtcttcagtgttcagtaggaggcattcattctccagccgcactgaggagaagcagtaggatcagcccattcagcctgaggtggaggtaagagtagtaagggcccactatgcttccctgatcttgagcttgaaccccaatatctgtctctgggtcttttattttttgttacaaggaattttttcctccaatacccaaaatatctccaattgctgttatttactgattttaaaccactctggataatctagtttctctgaatgtgagcggttagttgattaggagagatggtctgttctttaaataaagctgtttttcaaaccgttgatagctgttacaatttcactcaacaaggctgtatgtaccatattctgctcagtactgaagatggggtagcaggggcgagtgcagtcttactgaaactcatggtagcagcagcgttcgaaacattgatgagtggtattatatgcgccaaagaagcagtgatggtgaaatgggacctaatcagaatgtcagacaagggccagacaaagctcttaagagatacttaaacatattaaccagatgaattagcatgagggaaaatgtgcaggggcctgactagaaagaatctgcagagttggagaaacggaaccaaatcagcaaggggctggtgaggttggcagcggactgagggacgctcagccaaataaccagtacacgttgatgtgagaatcctgtatgaatgtagtgcctggtgcagccaagctgcagcagaactgctgactcagaaaacccaacccaggggatggggagagggctcaacagtttacatcacttgctgccttctcagaggatcggagctcagtttccacactgtgtggctgcttgcaactccaggtctgggggtctgaggatgatttttggccttcatgggaactcacatgtatgtagtgggtatatacattttttttatttttgtttttcgagacagggtttctctgtattgttctggaggctgtcctggaactcgctctgtagaccaggctggcctcaaactcgcagagatcacctgcctctacctcccaagtgctaggattaaagaggcgtgcgccaccaccacctgggtaggtgtatacttctttaaacctaattttttgttgttgttgttgtttgtttttcgagacagggtttctctgtgtagctttggagctatcctggcacttgctctggagaccaggctggcctcaaactcacactgcctgcctctgcctcccgaatgcggggattaaaggcgtgcaccactaacgcccggctaaacctaaattttaaaatgtagactattgattgactgcagatggagtctccaaaaagttaagcttacccaactgtaacacaagatacttgagcagggaaggttaatatgcatatttgatatgaatctaattaaccataggattaggagggcagacacaagacagttttggaaagatagcatgaagggttgtgtgtgtttatttgagacggggtcttatatggccctggttggcctgaaagtcactgggtaacccacaattacctttaagtgatctttcaggactctattccccaggtgtgtgctaccatctgtggctcaagaggctcttgcctttgccaattgttacattacaaagctactacaatcaacacatgtgtcactgtcacgggaaaaggcgaaggcatttttttaagaacctgaggtgggggggacttaagctattttaatacagatccttaaaatactgagggtgccacaaacaaaactaagtagaaaaatgaataaatctacagaaaatatagatcgaataaaacatgaaaatgtgcccaaagttcttcactgaaggtaacttgacaaccggcattaatattttaacaatttatggtatttgggatgcattttataaaaattaattggcagtaataagagcaaggacaactgccaagaggatcagaagttttgcatgttattgatgctaaattgctttaaatctggacttaggacacaaatttgtactttctatggtaatcacttaagtctgaagccaagcagtggtggcacatgcctttaatctctgcaggttgagctctgggttcaaggccagcctggtctacagagcgagttccagaacagccaaggttacacagagaaaccctgtcttgggaaaaaaaaaaaagataaacaagaaccaagaaacaattatttaataagacataggacatgaaaaaggcaaactgtaaactcaagtggtagaaattgttggcaatttatgtgttaggcttaaatacaatttaaaggcaaggattggctttaaaaaatggaaaacaatcagatttcattgtttaagtgtacttttagctaaaagaaacgcctagctgttgaagatacagctcaaatggtggagcccttgcagggaatgttcaaggccctgctttcaccctcagtactgtctgtgtaaagggggaccttggccaaaagacccagctcatcacccaaagtatgtgctgctgctatttctcctagctccacccagggatcatgtgggttctggaagaaaagaaatgatccccttttgtagggctgactcagaaccagctggttccagatctgagggggcgatgcagagcttacagagattgggatctgtggtagtgtgggtcactgctgtgtctcatggctctgaatctgtgatgtcattatttcagttccagaaggaataaagagagtaatattggtgctttggactatgagccgaggactagttggtgggagaggctacctggaagtcaattagcactgcttttgctgaaggaaagaaataggaagtccaaagcataagtacccctgggggattagaagtgtcattatcacattaagataaaagacagtggttccccaagaacccatgcttctcccctatgtgggttttggagaaccccagtgggtagtggcaagcttaattggtgactcctcggtggtagctgatgtgccacatataatccattgcttaaacaaattcacacatcccttgctaggtggcagcttttgatgtgaaaaattgctcccccatccctatttttaaaggccattagaactggttcctataggcgtcttcactttcctaccatagggatgtcttgactctggccaaatgtcatcatttgtcttggaagggtttttgttttgttttttttttgttgttgttgttgtttgtttgtttttgagacagggtttctcaaaaaaaaaaaaaaagaaaaagaaaaaaaagaaaagaaaaagaaaagaaaagcccagccctgcctagctgtcctggaacttgttttgtagaccaggctggccttgaactcaaagagatctgcctgcctcttcctcctgagtgtgccaccactgtccagtgtcttggaaggatattgatcactgctacacttatcctttatactggtgggattgtgctagttggtcctactaagcaagacgtaacaaccacttgaagttcagtgctaatacatttgtatttcagagagtaattaatccaattaaacttcaggggctgtctatctcagtgaaatgtcctagagtacagtggtgtagggtatgccctatgggttggtgagatagctaagtgtcaagagttcttgggcaatccttggaaccatgtaaaagtaggaggagagaactgattccacaaagttgtcctctgacttccatgcatgttccatgcatccaacatacatgcctcatgtacatgtatatacaataaaataataacaaaatacaataaaaattttaatgaaactaaaaaaaaaaaataatagccctcctaaaagaaaggttaggttgttgtatctggctttgtccacaagcagaatagaagtagcatgcctactgggtctccttgtatttatacataacctgttcctcatttgaccaagctgctagttttaccaaacaaatgattgaaataaaggaatccagattcatagacccagcatactaccaaaagctgacagttctgattgggcaaggccacacattttaaacctacccagacagggccaccaattggggaccaggtattcaaatgcaggtgccttatttggaatgccccaagccttcagacttagaccaggacttaacacaccagtatcctccacacaagttcttggaactttggcctgggactagaacatcacagctttgtgggcttccagcttgtggataatctgcacatttaacatccataacattgattcatatataatgttctatttcttcaatacaagttgttccattagcttgctttctttcccctgtaccccctgaattccattctacatggactggagtctgttttgttttggcctttgtctttcttgtatcagtttccaaatgccctggtgatgcctagttgaccgtgttagaaactaagtaaggcaccttaaacgacatggaactctatgtccttggaggaagtttactaatgagaggctctactttgggggagtgatttagaagtcaactgatgggtgttggggagtgtctcccagcaaccagaatgcaggattcctttctttggggttatttctcttttgggggaaccctttagctctttccctggagagttgatgtctagttatcagtgattcttgttgagaaagttgttaatcttggaaacagtttctcattaattccccttcttcatggtccaaaatcccactacagacctacagttgtctcccagtcttcttccttggctagttccctctggttctctctctccctctccacattctttctcttttccctctttcccccccttcttcctctttctacttgtgtgtataagtgtaatataataatggcataattataagcacatatagttactgtataatctacgatcccatgtactgagaaggtaggacaatagaggtttgtcagcatcaacaacaagatgctaaaagcttatgacaaattatgacattaacatgttttttattttccttttcatgtgatgttacagacaagtgctgtactacacagctagccccttcaacagatgtcaaatgttctcaaggttggatcttcatttccggaccaattttccctgaagagaatttgcaacacaaaatttgttaaggattagatccatctgtatacacacttagaaatagtgctgttaccattcatttactcactaaaaatattgtccaaagttgttttcttggaataccgcgcttctgtttagttttaaaaggttccttggaaagccacttctcttcttacagcagtagacttctggtagtgaattcaatggtctaggatttgatgaaacggtggctaatttatgattcaaacctggaattgaaaacaaattagtgccttgttttggggagtaaaaatgttttgacacaccatctttgtagcaactgtacaataaaaaagtaatttaagatgtttacaggggcataattaaaatatgggtgcctgggggggaaggcacttatggccaagtctgacaaatggggttcaatccttggctccagatagtagagagagagaaccggctcccaccagttgtcctatgacctctgcatgctcatgagtgtgaacacacatctaacaaataagaatgcaactaaaaaaaaattaaagcaaaatatagaaagggttactaaataaaaggttcttcaaagtttccagttagtaggcatattattggattatataaaagtttaaggaaaactcattagatttttattttgatatcctgatgttgctgtctgctgtcctctgagggcctgggttccagagtgggcatttctcccctgctgtctctggcatccctccagactgctgctgccttctctggagacaagagaccgagagaaaatccttcctgaccccgccattcttaaacttgttttgtagcccaggttggatttgaactttcagtccccaagcttctgcctccagagtagctggaattacaggcttgtataaccagttttctgtttttcagtaaagaaaaaaagagggacttttttttttttttttgaaaactattaagcacttagtagtacaggtgacacttggctgtgacagggacactgtagcttccaggccaccatgctggagagcgatatgatctgggtgtgaattctgcccctggctttcctcctggctgtgtgattcagggttagttcatgacaggtcttggaaacttggcttcctctgtttaaaacaacagtactcaccccagagagacgccatcccccactgcaaatttggggatctcatttaggtctcagcaattcactcaatgagccaaagttgaaagcaccaatgactacagcaacatgggtactatttaaatgagtgttgtgtgaatacccaggaccacctctgtccacctcaggaccctcatgtcggccacagcatacagatacgctacaaggggagtctagaatttctgaactgtggtgtaaataatcaattgttataggcatttaaactagaatgaaaagaaaggttccctagcagaacaccaggttacactcaaggttttgtttccagtgctcagagtcagcttcctaggacagtgaagagttttcaccctaacggtctcagatgcaaggagctagaaaggcaggaagaagccccaggatcccttctaacttctttctgatccctgatctgcacatctatttctgcccccagttttactggtcccagtcatgcccttcaaggcagtaagctcccaggatatgccaatcttgccacactggcaagtttattctcagctagttgatagcacttacctgtctcataaaatggcagggagtaggctctttggtaagttgtttcattataccatgtgttcataggccttgagaatctttcaaaggaaatgtattgaatgagcgtttgctggtctaattgaggctgataaggagttttgctcttggatggaattgccaagtctatgagtggtctgcatggaaacaaaagtagcttgctgaacacctttggagaatccgtccgttttctcgagagcttcgagttagaggtgtgtcctcctctgctgtattcctacccggatcgggacgacctcaaagctgcttccagtttcataatttaaatacagactatacaggtggcctgccaactcccgcccctgcatgaggatgattggaggttggctagatgaagttaactaagagaaagggaattgaaatagatagatgatgaactcgaacgagaatggccatgccgagggctaatatgccttagaattttacaacacttcttttatttgggagtgacatactcagagaaggtgaaaattgccccaaatcaagtttcccaaattgatacttttacctcctggagttcctagtctctctctggaccaggaaataaggtcgccatgtctatggctactattttttgcttttgtgtgtgtgtgtgtgtgtgtgtgtgtgtgtgtgtgtgtgtgtgtgtgtaagccacatgtagaaaggaagaaaccatattaatcaaatttataagtttactgagaatgaaactgaatcccagtaaatttaagttatttggccaatctggaattctaaactcaggctgtttcttaaattccataggtgttttaataaaaattctatttttactgctgattgtggaatcaatatattttcctttaagaagatccgtggactagagaaaagaggaaaagaatacgaagtactaatgatattaccacttttgaaaatggaaacaaagccagagattgtcagtgctagagatgtagctcccgatggaactcatgcctaacatacttgaggctttgggtttgatttcagcacccaaagccctcccaagaaaccttccaccctcttctggccattaggtaacacttgcgattaacattaaagttattgttaccattgagatcgtgtagctacagactggcgaggtggctgagctcttacagagaaacctgagatcagttcccagcacccacattgggcagctcacttctgatctgcatgggtgcactcaggcgcacatacccacatgcacacacacacatgcaaaatttaaaaaatcttttaagttcttcagtccacttccccctacttatcattttaacttcgatgaccttcttggaaattcagggttaggggtgtgtctcaccttggagccctcttcttgctgttatcaaagtggactcttgccagttgtccagtgtaatagcctctgatgtcctttccttggtgagcgataaataaactagagggagcagacagtgatgacagtcagtcccttacagaagtctaccagctggcatgtgataagtaatttatctggactttgtgccctgttccaagcaactgaaaccagtcagattttccaatcgtgttggttgttagtcataacaagtgtctctgtgttcattcgctgcaacccactacaggaagccagctctctggccagggctgggagctgcactaaccatggggataaacttctcagtgagtgcttttagctcacccatcaaaaggatatgaagagggggacccatcaagatgtctcagtcccttaaggcacttgcctctaagcctgacgacctgagtttaacccctgtaacccatggaagtcgagaactgactccataaagttgtcctgtatctccatgtgtatcatgcatgcccccccccaataataataaagcttagagcaaaaaaaaaaaagtgtcttttcatcagacctgagcttgtggtattggctggtctcccttccccagtaacctctaaaacctataatagagtgtcatttatttccaggactcataagcaaatatttagcatgtcatttattaggtcaaaagagagaggatgagggaaggaggatgggacagaggaagagaaggggagggggaggggagggaggaggcaacttgtaaagttaatgacaagttagagagagtaagagtagttaagagcactggctgtagaagacccagatcagtgcccagcacccacagctgacagttccaggggatctgatgccctttcctgacccctgagggtgcctgtacacatacatgtatactcaggaacatacactataaataaaatccttgaagtcaatgaaacagatgctggcaattcctgaaacataggaataaaaaaatgaggattccttattatttaacctttgaaatgtttataaaatttcataggaagctttctacctaacagtaatagttgaccatataggactgtgatgtcaaggcatgtgggtcctgtgaggaaagacaggtctctatacccttgtgctgggattaccagtatatgctgctgctgttttgaagcataacatgagccacccccatggggatccagaagatgtatgtctggggtgtgagcatgaactgtgtttgtacaactggaatgctgtggtgtgatgggggaggttcttctgtgtatatgtttgtcttattggttgataaagtactgttggccaataggaaaccaagataggtgggactaggagtcaaggaggattctgggaaatgtagtaaagaagtcttgcaatccaggcaggaagtgacatagcaggcagactcatatataagcaaggacaagaaggaagtcgttccttttttctctttcttctggtgtctgctctggagtcgccatgtgatccgccggcaagagagggtgccagcagtaggtgtcctcaataagataagtctttttttgtttgtttatttgttttttgtttttgttttttgagacagggtttctctgtgtagctttggagcctgtcctggcactcgctctggagaccaggctggcctcgaactcacagagaaccacctgcctctgcctcccgagtgctgggattaaaggcatgcgccaccaacgcctggctagataagtcttataaaatatatagatttatgataattaagactgagctagcagatgagaaatcctagtcaattagccaagaagcatttgtaccaaatataagtctctctgtgttacttgggaccttatcgtggcagcagggctccggcggcttcgtcggaaagatttatcgatacagtggtgttgaagccttggccccccgggttgtgctactggggaatggaagaacctttaggaagtggagtttgggggagaccttaggaatattgaggcaggagaataggatggaaagtgaagtccaaaaacccttacacaaaagctgtaagattaatatataaaaggaacctattgacaggggttggaggaagagctggtgggacactacagagagcctggcatctagggtttgcatagggtaaaagaaggagttttctagaggagggaaatcatataagtcaagactaaatcatagttaagagtagaatatgtgcagattgttagctttttattactgtagtgcatatcagataactcagcttaaaaacaagaaagtttatgtgcctcatggttttaggctgtgtccaattaattggtcctgttgacttggtcacacagcacatcatggcaggagtgcaatcttctaaaggttcctccgtagcactactggctagagaccaggccttcagtatactgacctttggggccactgaagaccaggatgattgcagggggcagggtaggtctagctgtttagtgtggaccaaagcaagtgctgggcagggcaggttctgtctgtctatgccaacagacctcagagagctctaattttctgaatacccaccgggtgtctgggcctgtctagtggctaggataatggactgaggcctgagttacagcgggggattaagtcataagaggagagagaagttggcacagaaatagggaacagatgacgttgctgagtgagtgggtggtggaggagcctctgaggcaaacctcctccagccctgatgtagaaggagtcccctggagccaagctacaagttccagaggaatccaggcaccctgggcagggttcctggggtttcgcggctgtctgcagcaggctgtttgatcttctctggtatcttcagtccagcaaagcccgctgaggcacagaagaatttcaccccactctaatcattgcttcgagaatagaaccatctctactggcctcctattgtatgatctgctgcagtcctttgaagagaccccctggctggttgggcagaggtgcagagagagtaagaaagggagtacctcagggagagcaggctgagtgaagtgaggtttggggaagaaaaagatggctcattttgcttctatcttttctctcttccttttgtatttcctgctctctcactcccctttcccactttgtcggtgcttccggttgaacccaggactttatacatattaaacagtgttctgtcacggagtcacagctcacttttatttttattttgaaatagggtctcgctggtcagtggtggtgcacatctttaatcctagcacttgggaggcagagacaggcagatctctgtgagttcgaggctagcctggtctacagagcaagtaccaggacagttagggttacacagagaaaccctgtcttgaaaaaacaagaaacaaaacaaaccaaaaaagaaactgggtttctctgcgttgtccatgctgaccccaaactcatgatcctcctgcctctgcctctgcctctgcctctgcctctgcctctgcctctgcctctgcctctgcctctgcctctgcctctgctctgctctgcctctgcctctgcctctgcctctcctctgcctctgcctctctgctctgcctctgctctgcctctgcctctctctgcctctgcctctgcctctgcctctgctctctctgcctctgcctctgctctgcctctgcctctgctctctctgcctctgcctctgcctctgctctgcctctgcctcctctgcctctgcctctcctctgcctctgctctgctctgcctctcctctgctctgcctctgcctctcctctgctctcctctgcctctgctctcctctgcctctgctctctgcctctgcctctcctctgcctctcctctgcctctcctctcctctctcctctgcctctcctctgctctgcctctgctcctctgctctctctgcctctgctctcctctgcctctgcctctcctctgcctctgctctctgcctctgcctctcctctgcctctgcctctcctctctctctctctctcctctgcctctgcctctcctctgcctctgcctctctgcctctgcctctgcctgcctctgctctctgcctctctctgcctctgcctgcctctgcctctctgcctctgcctctgcctctcctctggcctctgcctctcctctgcctctcctctgcctctgcctctgcctctcctctgcctctcctctgcctctgcctctgcctctgcctctgcctctgcctctgcctctcctctgcctcttgaaagcttgggttctaggtgttctctatcatgtccagctccctctgactctggggatttttccaagttctcatatgtgaccttaacctggaacctgagaaagcttctaatttagtcattaaagtggtgaggttttttgttggttggttggggttttttgtttgtttgtttgtgtttgtttgtttgtttttaattagtataaggagaaatggcttggccagaggctttgccgtaggtcccagcttctctcctgaaggttcagcttgagggagaggatgaatgaacgggacaatgagtgccccatgtatcaggccaggcttctgtttacaggttaccgattcctgagtcagccgtagaaagctctcctaaggcggtgtgggtgagccagctgtttgtggttctactgaattacttgcatgtccctgacagcttggctgtctgaaagggtaggtttaatccatacaagagtggatctctcccccgggagggtaactgtaaccagagcaggatctgggctcagctacaggcgacacacaatatgcatgggtgagatcaggagtgctttttgaccacacagcaccattgccagaaggaataccatcttgtgcccatctgagtcacctgtgctgggcctccagccttagagatataagatcctgtttaattctcaggcacctagcaaggtaaatatcatctccttgtttttataactgtttcagaacagtaaaaagaggctcagagaggctaagtggacattctgaataccacacagctagtaacatcagagccatgaagcaaattcagtccctaaattccatgtcttactcagagccatctacagtatacgtatgacttttgttttccagtggagttggcattatttctgtttggactgtatgattcttccacttctaggcagtcagcaagcaggcctaatgtacaaaagggacaagggaagctggtttgtgttcaaccaaaagagctgttaggaagctgcgatgtgtctgctgtgttctgagggggtgtgctgatggtgggtattgaactctcacccagggttcatctctaggtaaggaaagccacatctagacaacatgctgacaaccaacagtggtgaatgctgttggagaactgaagcttggggctaagtgtctcagctaaggatgtgagctaatatagaagatgagattaaaacagctgggagatgaccatcgcaccttccaggatgtacgggtcccatatttcctaaaggaatgggagggcaagttccacttgctcatcagtaaaatgagaataatagctactattttcatcaatgatggaagaagaatagtagacatttgtagctggagactgaaaggtcccatctttgttagatgtttctgtctttctagttagaatgagctgatcttgtagtggtgttgacaagttttagagatgctgtactgatatctgtcttagtcactgttctattgctatgaccatcaccaaggcaacttgtataaaagaaagtgtttaattggggacttgattactgttcaaaagggttagaccatggcctcactctgcagacaggcgtggtgctagagcagtagctgagagctttacatcctgatccacaggcaggaagcacagagagactgggcctggtatgagcttttcaaacctcaaagcccactcccaatgacatacttcctccaacaaggccacacctcctagcccccacaaacagttccactaactggaggtcaagcattcaaacatctgagcctatgggagcatttttgttttgtttttgaagaagagtttctctgtcctggaactcactctgtagatcaggctggcttcaagccagagatctacctgcctctgcctcccaagtattaggattaaaggtgcgtacacaactgcctggcttatgggggatattcttattcaaacaacctcaatctactccctggcccctataggattgtggtgatatcataaagcaaaatgcatttagcccaacttcaaaagttcccagagtcatagtctcaacatcatttcaaagtccaaagtccatgcctcttctgagactcaaggcaaactcttacttgtaatttcctgtaaaatcaaaagcagatcagatacttcaaactacaatggcatagaatatacattactatctcaaaagggaggaaatggggcatagtaaggaaatactggatcaaagcaagactgaaaaccagcagggcaaactccaagttctgtatctcttgtctgatgtccaagggttcagatgaaactttgtatatctcactgcctccagtttgttgactgtaacaagcttctgtttcttgggctggttccacttcctgcgtgcagctcttcttggcaggtatcccaccactctgacatggacaacatcttgggctctctaatgtaattcaggctttaccttcacagcttccaacaatggcctctctggccttcacaaagggacttctctgctacacacctggccttggggacttttcttaaccatgaaggaagattccacaaccccattcttgtatccttcttgactctaaatctagaaccatgtggccaaagctataaagttcttctgctttctggggctggaacctgcccctgccccttgagttacattttcataaactttgttgatgactttatttgatgcttaagcttttctttacttttttttcaaattggaagctcaactgtgtggggtcttgccctgaggacaccattccctctattaattttgaattaggcctgtccttaaactttttatctccttgggcacaggacttggctccaacattacattccttctctagtgctccttttctctcagactatacatttttaaaatgttttttttgagatagggtttctctgtattgttttggagctagtcctggaactcgctctgtaaaccaggctggcctcgaactcacagagatccacctgcctctgcctcctgagtgctgggattaaaggcgtgcgccaccaacatctggcccagactatacattttatatttctctctgccccacttgctgcttatttctaattgtagatctgcagaagggtgatcattaataaccacatgacacagtcagcactaggctgtcttgaaatctcctctgccaacaccaccaatccaaaactctttaatttagccaagattctttgttaaaatatcacaagaatggtctgagaccacttactaatattcttcccctttgaaagctgttgagttgggtctccatagtcaaaattgccctcagcattattgtcttcccctacttagatggccccttaagtcccccttaaagtttttaactgattttctaattcaaagtcctaatgtcttccatattccttcaaacaacaacatgatcaggcctatcacaacaatacttcactcatgataccaacttgtgtcttacaaacaccatgaccaaggcaactcttatgaaagaaagcatttaattgggggttgcttatagttttagggggttagttcataatcaccatcatgggaagtagacagacatggcactgaggcagtagatgagagctttacatcttgatcctgaagcaacaggcaatgggagagagagagaatgatccaggtacgggttttttaatccccaaagcctatgtgatatacctcctccaataagaccacacctcctaatccttctcaaacagttccactaactgggaatgaagcacccaaacatctagcctctgggggcattctcattcaaaccaccacaacactgacttatttattttggtgctggggattgaatctggtgccttgggcatgttctaccaccgagtgacacctccagttgtttgttgatgtggtttatattatgtgtatgggcacttttcacctacatgtatgactgtgcaccatgtgtgtacactgcccacagagacaagaagagggcgtcagattccctagaactggagttacagatggttgccaggttgatatagtcatgtggatgctgggaactaaagcctggtcctgtggaagagcatggaacattcttaaccacagagccatctctctaacctcacaactgaccttttaaaagggcgatcaaatctgacacaaaccctgagtatttgctctcccacataacactgattttcctccatttgggggatcttttcaggaatatgttgggctccacaaaccaacagaacatccatccctattcagtgaacagcaggcctccagtccagctgggaatgacactggctagcacttatctctaattgaattcttcttgtgagactcttatgtggtcactaagattattcctgagccttaatttaacttttattaggtacccacactggtttgccagtccgtttcactagtctagccctcggggcatgcagggataagttggaggaatgtttttacaaacaacagaagggcagatctaagttctgtcaggggccagagccaaaccaccactaaatactttttctcatttgttctggtttactcaacaacagtgcacagaggacctactctgcttagtcaccaccatcaggcagaggttatggaagcgattttcagagatgggcaaggaagttccatgctagagtgggaccaacccaaacagcaaaccatagtgaagtcagaccaggaggttcaagttccctctctgccagctgtaacctgtgagctattgggacagtcacttacccacattgtacctcagcttccttatctggaactcacagatgttatgaaggttaaataaaataatatatactaaggctaatgctgacatgcagttaagagctgcctgttagctcattattctagtgatgagatgggtaggaaatggattgtaagacataaaaactggaagttgtgacaagggaactgaagcgctgtgaagtgggggacgtgggtacagagataggcagaagggctcccagaccaactgccaacaaaaatttgtttccatttttcctaggagatgagcctacagtagacaaagtgatcttccccactcacagaaggaccaaggatctgaggggaggaaggaatgaatgaatgcagaacccagtcttgattgctctccctcctcctttcacctggggtggagtttggagaggggcagggtctgtaccttcctcagccctggtggtttctggagagacttacgtaggtggaagcactgggcgacgctccacaaattctcggagtcggatggtcgtcatgatagatgggaatctgaaaagagttttggagagagatttcatattgcaagtttacacacatttccaggcattagctattgctacagtttggatccagattgcctccaaaaggcaggccctccccaggcagatggacctgggctgtataaaaaggtggctgaacctgagcctttggaagcaagtcagtaagcagggttcctctatgatttctgcttcagttcctgcatctagattcctgtcttgagttcctgtcttagctttcctccatgatggggtacagcctgtaagctaaataaactgctcttcccccaagctgcttttggtcagtgtgttatcacaacaccagagaagcagactaggtcattctgcaaacagctttctggtttttgcagccttgtcatccaactggcttcttccagccccacccaaacctgactgtgatccttttaaaagctctcccttctcagtattgagaacttttctattttcatgctcaccttaaaccgtgttgtttcttgccttagttttgattgccatagcaaaccagtacattaaacattcatgtgagcaagtccataactgggagggcagttgagtgtgtggagactgaggttggagagaggcctgccgtttctagagtacagtcatgattagagtacaccgtgattaggttgtctacataaagagagcagtgtctctaatttgaatacggcatcttgaggtagcaggcaaaccttcgatggagacccctgttgtcctgggcaagttatttctcagctctgaatattgattataatacccttccgtagggttcatcgaggcaataatgtgtgtgggcgtgctctgtgccatagaggcatgcttgagaaaggagaaatatgagtttatttgtgagtctatgtaatatgtaccaggtagtacactgtaactaacagcatcctcaaggaaggccttcaaaggactgtgactattttcctcacaagaaaatatatactcagatgtgaagtaacttgtgcaaggtacaagagacccgggctggaatcctcagactcaagaaccatccatcttggtgtttcttttttctttttttttctttttttctttttttttggttttttgagatagggtttctctgtgtagctttggagcctatcctggcactccctctggagaccaggctggcctcgaactcacagagatccatctgcctctgcctcccgagtgctgggattaaaggcgtgtgccaccaacaccccgccaagaaccatccatcttaatgcctgagttacatacaccaaaatagcccagagcaccaagagacctcagtcaaaacaaaactgggactattcaaaaggaaccaggagggaagagaagagagcgttggggaaagtgtatgagaggcctctcttttccttctagagtcaagttcagctcaccctcgggctcctgccagctcttttacctctcagtggatttttcaaatcaacttgaaatttcccaattgcattacactgtaataattagagaggttggtgatgtatccagagaagcctgtttaccgcatagaatctctttttccaagagacctactttaaatccttaattaacatctgctaactgtacatattagtgaggttcaatgtgccctttccatacatgcatacagtgtacgctgatcaaatctaacctacactctttccacacctgaccaccctccccaatccctattctactttcaggccaactttggttcttgaagaggggacattcgttcttatcctcctgcatctctatccctgctttataccttatttttccccaacacaaggctgcaggggtggttaagatgctttagaagtcctgggcatttttcccagtgtcaggcacctgagaagtttttcctaatggagacaggctttttgaagacttggcttaaaagtgattttaaaaccagcattgacttctatcatacacacacaaaagttaaaaaaaacaatattgttgtctgggcctggtggtgtaataccagcgcttgggaaacggatgctggagttttgcggtacagcaagaccttgccttagaaaataattaccaaatcagatgttggtaggtttaaccaatatatgaataagtaatatgaataaatggcacattgccaatgagtctgtttagagaagaggcaggaacagaatgtcagggccctgaaattgttgctagtgtttaatccaccaagatttagaattctcaaccaatagtcagtgtattgtatcctcattacagtaacagcatccctgaggccaggcaactatacaaagaaaataagtccatgtctaacatttgcggctgttcaagcatagcaccaacgttagctagactctgaggaagcattcatagtggagagcatgtttggatgtagtcggtcattaaggggtttgtgcgttagaaggtgctgggttgtgagtgtgggggaggtcactaggcatagaggttgtttaaaaatccatgcccactgagtgctctgggcgcctgtctcactgtggtatcttcctcgtatatgttctccactgagtcctgctccatggagtgagttccaggacaggtaggagctaggacttatacagagaaaccctgtttcttgaaaaaacaaaacaaacaaacaaaaaaaccaaccccaaaccaaaaagcgaccccctatttagtaatacaaccactgggagggtagaaaggcacaagaggtaccagccttgctggcattaccggtttgggtggtagcacgcaggggccttcttgttcctcaaagcagtcctcctctgagggcagcaagtatttgagtcacctccctgtgtgtggtatgcttagaaggcacatggcagagttgtgggtcttggtcccttgacatcattcaaaggggattatgatgcactgtggggctgagagaaagagttttcaaagtctctaaaagctggcatagctgcacattaaacgaaagggcaggaattggtgtcaaagggaaagccatacaggtaagtgacccagactatcaaatcactagcacttgcttttctataaacattgcttcaatggcaatataaggtcaaggagttggtgtgtcctttgcaagttggaactgagaaagtagggttggcacagggacaaaggaacccagccctgcctggtctaagaccacactaggcttcagaaacctgctgctgctaaagccattgagaaggcttttaattgtccacgaatatgattctaaccaacccaaagaccatcacaacagcagcatgactgcgcacacagaaaagcaagtcacagcctgagaacagaatggctataggatggtggttcagaactggctatagcaaatttctaagaccaaaagaaacactggcattgtctaccataggttggcctggaaacagggcacttctgcaaataggaagtgaaatggctctacaaggctccagatggcatgcaggggaagacttggcaatgctgtgctccccctgggaagcttaacccatatcaccacaacacaatctaataccagaatcttggtgacgtggcattttgttgaaagcagacaaacatgaaaaatgtaaacatgaggacaaaacaacattgggcccaggggagcggaagtggtgcgctgagtctcacttgggagaagcaacttcggtttttcggttacctgacacctaaccatccccgtctctgccatgacccagagagtcaagcaaccccatttggaataagaactaagagaagcaaagaacttaaccagaaatcatacaattgggaagtcatggatctaggatttgaatccaaatcagtttgacttgtaagtccagttgtaatttgcattttaactcaagtatatcaacctttcttttccattagttgacacagggtctcatatatctcaggctggtcttgaggtcactatgtagctgaggatgaccttgaacttctgttgacaagacttagatgtgggctgcctgaaggtgggaccataaacccctaactctggtgttcttgcccagggaaattgtggattaacaagaccaaaagatcaacacacacacactcagcagacatggggatgttgtgctgaaggtaggaccttgggtgcactgtgttctgcactgggctcctctacctgggactacaggctcctccagaggcaggtagagaagtcaaagaggagatcccagggctggcaggcaaccagccatggctggcaggctgagtttccaaagttggtgaataaagggatatttgtagatgacagttaccccatcttagaatgaattctgactaatggggcaccaagacaccacatgttcccccaatattagccctgatttaattaatgattacaaatatccctactagtctctctgggttgaagattgtgcattacttcaatgttccactgttttcctatattacctgaattgtgagaacacatgctgtttttaaacgcccccccccatttacttagtggggaagaggggcctgcagcctgtatgtggaggtcagaggacattttacaggagtccctgctctctttttaccttttgtgggtcccagggatcgaactcagatctttgagcttgagcttggtggtgagtgcctttgcccactgagccatcctgtcagcttaagggaatatttagaggttctatgcaaatgaggaaagtctctgagatttcttaacatcccgggagaaatgaggcattaatgaagagaagctgcccccaccagacactgggaaggagtcttttaatgattatgcttccaaacttgagaatctgaagaggaaaagtgacaattgccctgacactaatcttcactgtcatctcaattgaatttggagtctcctaggagactcacccctgggcatgttggttggggtgttcccagagagctttaactgaatgtgagtgacaccatgtcatagggtagggtcccaggctgaataaaaatgaacagtggagaaaaccgtctgcgcacagcaaccatctctctctccttccagatcattggcaggaatgtgcccagtagcctgtccctcttgtcaccaagccttcttgccacgatggattgtatctcctcaaatcacgtgccaagacaaactctccctcagttgtccttaccaggcatttgtcatagtcatgagaaaatgtcaaactcacagaaaagctgaaagaatacattgacaagtatgatgaacacacaagcacctttgacctactttgaccagtcttaatattttgccacattacataacgtgtttttgcatgctggagtccaaaccagtgcccacatgtcagcacacgctgtgccactgaactacttccccaggccccctctattcgctcattgtttagagtgaatttattagctgagtttcatatatgtatgtggtgcattctgagcacattacaccccaccctctcatcccttccctcccccatcatcccccccccatcatcccccctccctcgcccatcatcccccctcccccatcagccccctcccccatcacccctccccccatcagtctccctcccccatcagtcccccatcccctctcccctcctcccctcccatcagtcccccccctcccccattccctccccatcagcctccctcccccatcagcccctcccccagccccgtcccatcagccccccccccatcagcccccctccccatcagccccctcccccatcagtctccctcccccatcagtccccttccctcccccatcagcctccctccccatcagtcccccttgcccatcatcccccctcccccatcagcccccctccctcccccatcagtccctcccccatcagtctccctcccccatcagtcccctcgcccatcatccccctgcccccatcatccctccctcccccatcagtccccctccccccatcagccccccccccatcagcccctccccatcagtctccctcccccatcagcccccccccatcagcccccctccctccccatcagtctcccccccatcccccctcccccatcagccccctcccatcaggccccccctcccccatcagcatcagccccctcccctccccacatcagcccccctcaccatcatccccactcccccatcagcccctctcccccatcagcccccctcccccatcagcccccctccctcccccatcagtctccctcccccatcagccccctcccccatcagcccccctcccccatcatccccctccctcccccatcagtctcccccccatcagcctctctgccattagtctaccacctccaacagtctccctcccaacattctccgtccccaatcaatctccctccactttcatttctgctttttttgtttcatgaaccaatgagtcttctaaaacaaggaattgtaaagaatgatggtgttgtcatcaaccgctgtgctctgcttactgctgggtagtgtcaggacttgactttcaggggagggctgctgatagaggctggtgtcactttacctccactacagactagcctttgaactctgcaaacacttctactgaagaagaaaggtgacctggattagtaacacacctaaccagtaagttaaccccggatgggcagaaccccagcacacaaataccagtaacaagaatatcaggacaatatgtcttctccaaaaattatcactcctatagccccagtgaaagcccctgaaataaagctctagatagagaaataaggaggacaattatatacaggggctggagagatggctcagaagttaagagcacttgcttgtcttacagaggacctgggtccagttcccatcacctacaggacagcttacaactgtatggaactccagtttcaggacatctggtgtcctcttctggcctcctcctgcaccaggcaggcatgaggtgcacataacatacatagatgcagttgagacactcataaaaaatagaaaatattttaaaaacaaaacagaaaaaggactactttgtcccacaggacttgggtctgaaacctgactggcgcattgagggaatgaagaaagggcatacacatagaagtacagaagagctggggttaggtgggttgtacagctctgtgccagctgggaacgtcagcactgagggaggagttagctcatctctctgtaggtctctgcaggctggaggaggaagcctggcctttgcatgcacaggtcaatcgtttgttaatccttgtgctagcttacactgccaccaagacttgctcttagaccagaggaaggctttgccagtgtggagcctggtcttggtctttgacaggactgtgtccaggtcaacaatatacatttgctcaggacttcactcattctctggaaaggacaactacaaatttataatacaattataaatatgttcaaatatattaaagagaagaataaactcttgaataaattccaagagaatatgaacagctgaatgaaagtcagaagtgaatttgggatatgaaagtagaattcaataaggacatagaaacacgaaagacaaaaacagcccaacaaattgaaatgatgctggaagtgaacattttaataagtccggtagaagagatcatgtgtaggacataatattggggcttgaagaagagataggaattggatcattttgtcaagataaataataggtttttttttttaaatctgtgaatggagcatgaagatctttgggaagccataacagaaaaaaaatctatgaatataattttaaagaagaaaaataatttcatgcagaagacatagaaaatatttttaataaaatcagaaaaacccaaatctagggaaacagatgtccatatagatttaagatatacacagaacaccaaatagataggaccagaaaagaaattctgcatgggcaggatgttgtgttgcatgcctttgaactcagcactggggaggcagaagcaggtggatctctgtgagttcgaggccagcctggtcggtcaacatagcaagtccacaccagccccatatggtgaggctctgccttaaagcttccattcttacccactcttgacctaatgggctgtctcactacaggccccatagcaacaggccaactcataggctgagacctgcacactatgagccaagatgatcttttccccactgtaagttggttatgtcagacattttatcatagtaaccaaatactaactgatatagcttcgaacacacctttgtgtgacccccttagtctctctgcttctatggaacattcttcaagccagtgggaaaggcaggctgtgggtcagaaatgctgagctgagtttctggctttgctccctgactttgggtgtgttttctggcttcctctagtgaagatgatggttgctgccctgtggaagcatcctgcttctgtgctttccattggataggctcatgtgatggttgagaaatgtggagccccccccctctgggggcagtggaaaaagcattgctgggtggttctggccgagagaggagcctagaggtgaaacaacatgctagccctcctgttcttttgggttggactgcaccctttgtcccagagctgggtggctctacactggcaggggagagccggctgaggctgaagttgccagaggaaaccaaacaattcttatttaccaaactgtcaaaatcctatcattgcaattaaggagacgggcaattaactgtgtcttaattacagcagctgccacttcttctgaatgctgtaatttacgaagagaatgggaggagactctaaattaatgtgtgtctttaaacaacgaaaaacattgatgaggcctgaaggaaattgtcagcggtggtcttggggcccctcccagaaggaggcattgttgggagttgcctccaagtgcagtcttgattttcagagcctttgttgcctaccggctgcgttttccataaatgcccagtgacattgttacatcctgttttatgtacaatgcaaattcccacagcagtatcatctgtggcagccgttgtaccatctcagtttggttgcttttagacttagctttaaaacaaagagatttaaacaatgtgtccagacacccaggcagagaaaggaggttttctgtggaggcttgtaaggggtagatctgcctcactgcactttttataggagaaaacagagggttggggaaatgaggaccaggtcatagcacaagctagtcagtgaccaagttgcctttaagcccagagcttgattctctccagggacagactggcatcgtgatgtgcaagtgagggacccagacagggaaatggcagagccatgacactgatgatggtaagcagctctgggaagtccttcagcaggactcagactctgtagcctaagcgtgttgaaggccttgtgttcgttcagtccccagcatcaaagaaacagggctcgggttgtagctcagttggtagagtgctggcctactacccacaaagtcctgggcttcattcccagtaccctgtaagctgactgtggcacatgtctgaaatcttagcacttgggtaatagaggcagggtgatcaggagttcaaggtcatccttggctacattgtgagttcaaggtctgggctacaagagaccctagagagagtggggaggagggaagagagggaaggggagaggaagagagaagaacagagggacagaaggaagggaaggagggaggagggaaggaaagcaaaaagggagagaaggaagaggggaggactggagggagggagggaggagggagggaggagaggagaggagggggaggagggggctgacatagtggcaggaaaggtaactggaagctggggcccaggcttagctgtgaactcgtggatagctccagtccctgggaggcctggggtatgtggtgctatcaaagctctcaggctgcactgagcaggcttcaaacctgcccttttccagccaggtgatcttgagcaatgtccttgtctctgaaccaaaggagcacgtggcctttcacctgaatactgggagactgcatcagactttcccaactgctggggggataaaaggacaacatggcccagggcctggcccaatgcccagcacgggagaggcactggtgtatgccaacatagttcttctttcctggaaggtgactaaggccttcccataccaaagggtaggaggtgctggtgacccagatgaaggtgtttttgacaagagctaagcacatgttaggaggggacaagggtgggtaccagttatcgtcacgaagaaccagaccaatgctggaccactgagaccatagacttggtgctgagtcctgcagaaaccggctttgaggatgtccaaaataaatccaggagctgtgtgagagactagacagcccagatgcatggagagaagagatgctttgctatggagctgagttggctccacacacccccaggatgctgcagagctgagcagccatcctggaacctgctctgtagacgaggctggcctcaaactcagagatccacctgcctctgcctcctgagtgttgggactaaaggtgtgtgccattgtgtcagcctacaactcttccctcaaagggaataaaagaagaatttattctgaagccaaatacgagtggccacagcccagaaacactgatttaggttatcccaaatgccacatttcaatacggcaacaacagtttcatgagtcttttacaattagagagtaaaagtcacaaatcaaagtatttttcaagtacttttgtggaaacaccacgtagccaggttattgtaaggtggggaaatctctgccatattccaacactctgtaatcatgaccattctaaacaacctggtagaatttttttttagcacaggtgaggcttttcttctgggaacttgatttcacacgggagaatgtgactgcattaaaagcattcagggaggggcgcagccctgcagacacacctcaggctgctgcattctacaggatctagttgagatctgtcttctaagacaatcagccgatgcctgtaaaaaccttcatgtgagaatcgactctaatctgagtgttccctgacaacccacatgataaagatggaactggccaagggagtgcaggctccgtaagggcagggagtaagtcaggacgtatgtttacccggtagacttgtgggtgtttgcctttgtgagcatttgactgacctaaactgggggcattttctggaatccagataaggtcctggccagtgtccaccttcctggccagtatcacataaagcttgctttaattgagtaattgtggaactggtctttctccttgctattctcagatttaacagcttatatttcgtcctatttgggccccgtgtttgttctgtgctgctgtggtaggattcacaagtctgagtcatttctgaagaacagaagtttatctgttgggaagtctgagatcagggcacaggtgtctggagagggcggctgtctgcttccaagatggtggtgtcctctgaaggtcaggaactctaccctcatatggcagaaggaagaggaccttccccagagtgaaactcgagattcaactgctttctgaaggccacctctcccaacactgttcactgggattaaattgaatgggagcaggcaatgggtgctcatccctgctgcttccccgccccctcctctgactccatgtccaaggaaaaagctgatgtttgccatctgcatttgatgggatgtgagctttggagagcctctctcaggggagtgagcattttagcatcctcatttgtgatcaacataattatgagtgttctgctcctcagatgaatggtgaccgagtggcagtcacctgtgcagagctctggatcactgagttgctgtgggtttcctagggcagaagacagaaaaggaaaaaaggtgatgatggcacaggggacagaggcagaggtgggatcccagggggaagatcaaggtgcatcccactattttacaataattgactttctctttaaaaaacaaaaaacaaaaaaacaaaactggagtcaatttttttaggattcgggcatgggattcattgcatgtagaccttaggcttcatgaaaagcacccttacctgctgagccattttcccagccccaggagtgtctttcaacgcctttattacttcaacctcacttgaattttcttctactttccagttgttacccgctcatttactcaaatggtcaagtgttgagtatataattatgaacaaaatgtggacttgtcctcaggagtgactatcatagacactcggtaagctttccccagctgaccttacctacttcctgcaatgtgtccagtgacccgtaagtgctctgccatgctgaattttcatgctggttgtctgactttcttgtctttctcttctcataagtcaataccttttgtgagagaggagtgggttctctctctccactatgtgggttctgggcattgaactcaggtcgtcagccatgacagcaagctccattcattacctgtcgagccatctcactgccccatgctcaggcttcttgctagtggccccattccacttatttatacactgcaaagccacccctaaggctccaggagttgaaagtgaggaccagttccttgggtgactctgagagcagctacaggcactggatggctgcattcttcacttataaaggaagaaatatatctgctaggaactgaagtacacgtggtaaggcctgttgctatactccgaatttatgtaaatgggacagtattctcctacctgatccaatggggtctgaagggagtcagttatgatgagcattgtagcttgaatctaaagtgtcccaggaaagctcaggtatggatggtttggtcttcagatatagcaatgttcatagagggtaagggttgggggtagagtggggtggagtgcctgaatcctgagagttctgactgcacaaaaaggttaatttatctgtggattcatagtttaatgggctagccggaaaggctactggaaagccctgacccatgtttgactaagaatatgatcttcatagatgcagggatatttattactttctttatggttcttcataagaatttttgaacttgtttttttgttttttgtttttcaagacagggtttctctgtgtagctttggagcctgtcctggcactctctctggagaccaggctggccttgaactcacagagatccacctgcctcgtgtgccaccaatgcccggcaattattttgacctcaaatgaaaattacagttttgaaaaaattaaaatatatagagatgtaaacatgtaatagttataagtggcagagaggggacatgtgcatttatatagtctcaagagtgttacattttctttcatttacgtttgtgtccgtgtgagggtatacacatatgtatgcatgggtgcctctggaggccaaagcagggtgccacagtccttggagctcaagttacaggcttttgggagctggctgctgtgagtgctgggatctgaactctggtcttcatgacagagcaacaaatactctcaaatactcttaaccttaatggcggaggctgctctccagcccaagatgtctgcattttatgggaaataatacatattaactacaagaaaatataaaaagttaaggatctctctctctctctctctctctctctctctgtgtgtgtgtgtgtgtgtgtgtgtgtgtgttgtgtgtgtatgtaattacctacccacctgcctgcttgcctacctacatgtatgcatttctagggaagccaccaataagtaaagaattatagctaaagtctgctgcagaaaaccaaaccaaagcaaaggtctccccttgctggagtttcactttctgcactttcagtgacaataaatgaggctctaaaaataccaatggaaagttccagaaataacccaaaagtttaaataccatacagtcctgttctgagtcccgtgatggaagcttttcccactgtgctctgtcctgcctggtcttgaataatccctttgccaggcagggccaagctgagctgggtactcaacccatccattggtcatttggactttagttgctggactagccatctcagcaccctgtgcttgtttgtgctcaggctacctttattttacgtaatagtgacccctgggcacaaaatagtgacattggcagttcagatatgccaagagcaagtagtaaatagcttcctttaagcaaaaaggcacaagttcttcccctaacaaggaaacctgttaaaaatgtacattatgtgctggagagaggctcggtggttaagagggcttgctgttctcccgggtggttcacaaccactcaaactccagctccaggggacccagtgttcgtttctgacctctgagagtatctatatacacttgttcacacacacacacacacacacacacacacacacacacacacacacacacacacacacacacacagtctttaaaaagtgcattaagattgctaaaatctgaatgaagaatgaatcttcttcagtcatgaagttgacgagggaagagtgatgacctgtgcctcatttgctgtcacatctcaaactgcaattgcagctggtcctgttgcatccacagtcaagaaacagagaggaatgccccacaccccagttcatgggatggtgcctcccattctgagggcagagctgcctttacagatctgctcagagatgtttccatgacgattccaaatctcatcaagccggtaatgaaggttaagtttcaaaaagagtcaagaaacataggtcaaaaatctgttccataatatcacaggaagaaaatacatctctactctgagctatttacaggacacttccacttaaatacaaacacacaaagagaaaaacaagagcctataaacatacacaccaaaccagaagttagcttaagaaagctaaaatagccatacaaatgtcagaaaaaatagattaaaaaaaaaaccaaagtgggttattaacaataataataagagggttaataaatcagaaaagatatatttgtgtatgcttagagtaagagagtttcaaatacaggaagcaaaaatcaacagaaagagataggtaaacaatgttaaaattgctgtcagaggttttcactatctttctcttggcagttgatagaacaattagtcaaaaccaccagcaaggacatggaatctgtggcaaacacaatcatccactggattactattgacaacaccatgcctgacaaaggcaggataaaaccaagagcaagcaatacactcagctagatagtctgggctctaggggtgttaggcagctttttgttgctgtgacaagctagacacggttcagtgtgtggctcaatagtcccacggttgtgggctcagagcaaggtagaagggcagtgggagtgtgtggcacagatgaccaggaggggagagagatagctctctggagggtcacttgaacccaggagttggaggtgagcctgggtagcataaccaagtcctttctcaaaagtaaaattatgaaaataaaattgaaatgtttgaagtggaaagaaggaaggaaaaaaggaaagggcctttgtagcaagaataataacaacccagagacagatattggggttcaagctgaagatcagaaaagcaaagcagccatccactagagagttcttacctctaccaatgctcagactgaaggagcaatccaccaaacctcagattgcatctccagactgtactgctctccagcaatcctcagaatcctagactgtcttgctctcctcaatgtggctggagactgaatgcctaagactgactttgcttcttccttatatacctctctagttctgggattaaagactgttattcttttttttttgtttgtttgttttttttgttttttgagacagggtttctctgtgtagctttggaggctatcctggcacttgctctggagaccaggctggcctcgaactcccagagatctgcctgcctctgcctcccgagtgctgggattaaaggcgtgcaccaccaacgcccggctggttttgcattctgagctccagtagctttattagatcataagtgatgtatcaccacaggccttctccagcctgtgactgtatatgttttcaaacacctgcaaagtagctgtagaccccacccctgtagtgccaggaaaccagagcctggcacatgccaagcatgtgtctacaccaccaagcacatgcccagctctgccaatggtatctatctaaaatcaagaacactcttactgagccttgtactggatgtcctagccaatgcgatcagataagaaaaagaaatgaaagatgaacatattgagcaaacaaaaatatacagctactaaaataacaagcagttgctagtacaggtagacacgggctaaacacacgtcctcaaaaccatttattgaagagaaatagcaaagtatgcccacacaaagataagtacatgactatttatgatagaattattcagagccatcccaaagtgcaagcaaccttacagccacagatctgaggaggggtgaacaattgaagtatatcgtagtatggactgcttagcaatgaaatggaacaaaattatcaacatgtgtgacaacagagataaaaaatgtcaaggacattaagctggctgaaaaagtcaaacatagaagacgaggctacacactttatgaatttcctgtgctaagaagaaagctcgtccttgatctggaaaagggattgcccatgaaagaggcaccaggaagctctggcaagggagttaccgtgttgttaatagtggtggtggctgaacatttgctcaaatgatcaagctgcaagcttttgtttgcttgtaatggctatagtggcaaagaaaaggctcgcctctgccctccaaaggttccttgaaatgaactgaacgttggcagactgactggagaagaccatgtgcaaatgtgtgcagggcaaaaaaaatcacagctgggggccatacacagagtatgtggcttccaagggtcagatagatgaggctcaagcaattccccaggtctcagaaaggaatagaggtgtggatgagatgggtttgtgggcatcctgggacaatctttgggaagaataagttctcagagctggacagatggctcagtggtgaagagcactggctactaggttgaattcccattacttgtatggtggctcgcaactgtccagaactacagtgccagggatacctctttgtcttccatagtgacacgcacacatgtaacgtataggcatgcatgtagaataagcatgtatgcatattaaattaacttaaagaaagccaattcttcccaccatctaggtacaagggactgaactggaactaggttgttaggcctagcagcaagtgccttgaacctctgagccattttgtcagccctgaaacctaatacttgctaattaaaaaattattttttgagataactggtgcaaaatctgttcacaacaaacttgggtttgctcatcacctgctggaaaactcacttaatctttttgcactcagttttcacttgggtaaaacaaatacctaagtactgatcttagagcaggataattacctgctgcacggtaagtgctcacggaagactttgtgggaggagctcaggggaagaggaatgcaggagcagagagcatcagctgggcagaggcaaagaaccagccagtgagaaacaactcagggtccagtctagtagaaccttgagaggaatgaggctggcagggtcaagggcagagtcactgacaactttgtctgccacatagctgaggattgttgggggttctgtttgtcctactgatgaggctccttgaaggcttacagtgagtttaggttttcatttgaagtcctgggagtaatgaagacagcacaaagtagtgcttcacagagcgtgggaggttggatgtgagtcttgtttatacaaccaaacgcaatggcttcatttccttgacgagctcagagccaatctgcccaaccagaccaaagagtggatggggagagattattccgagcacagtgtttctccaagcaaaggcaagccagaagcttctacaagggaagcttgcacagattcacataagaaagacttgtcatcacacgtaggggtagacgaattcccaagtatgctccgttggggatcatgcattgcgttttgaaaaacacggcagaatggaaactctctgggtgaagaatttcacaccataatgagcaaaattgggtgcagatcccctaattaagttggctggttccttgagagttactgtgtttgaactggaaacaactcagcgcaaaagggaaacctatgttggtgctggagacggctcagtggataacagggcttgctgctcttccagggaccctagttcagttcccggcacccatgccaagtggctcaaaacatcctctaactctagttttaggggatcatatgccttttctagcttctttgggcacctacaacactcatattgcacacacatgtccatgcacacacagacacatacagacacacatagataataaactgaagaacaacagaagaaaacatagaagatacctggaacggacttctggcatccattgcacacatgtgagtgcacatgtatacacaaacacatacatcaaacacacaataaataagtaaataaataatacataaataaaattgactttgaaaatttggttctgatttttaatctatataatacaaatatattttaaatataagaaaatagaaatagctggaaagtgtggtaagagccatttatcaagggcacatgtagagagcaatgagattggggaggttgggtttttgagacagggtttcacttagttgccctgcgtgtcctgggactcattacacttgaactcacctgcctccgcctcccaagtgctacaccatcacagttttctgtctttctttccctctcttttggaccacagctacccagggcctctccagccctgagcaactttattctgactgcagataacccaagcagctgaataggtgtttgagatacagaactatcagaacatggagatgggggaagccaagccacgcgtcagttggcatggactcatttagtataaagtaccacatctgaggacgtggctaagggatacttgccatttcatacttctagatgctacagttggagatacagtgtggacaagactggttctgataaaggttgccagagagagtctgcgtgactgtccctgggggaaatgtaaagaaactatttattcacaccctccccaatagagggtgccaatagaccaaagacaagattccctccaagtctatcttggtgaacgcttgagcttactggggttactaacagaaatgtgggtgactcacagggagctgtgtcaacagcgagctgcctgagtaacagccagctgttagcctcttgtatagctctgctgggctatcctaaggattgcatgaaggctcacaaacgccataaactctgtgagcttggtgagcctcttccctctttctttgagggagtgttatagggctcactcaccggatgagtgatctcaaaagtatttattcgagatggcaatggtcatgcctaaccaagaggaaacagtgacacacttactaaccctgtcattttgatctctgcctttctcttcaaatgtgtctctctttctcctctgtctgtctctctccctgtgtgtgtgtgcttctgtctctcccccttttttatccttctctaacttttatctttatatcttcagcaactcatttctacattttgaagtattttgggttaggacttcaacatataaaaatttaagggacactatttatctcttgtcatagggtgcgactgatatgtgagactataggacagaggagagaaagaagttaggccagaaagcaaaaccatgataagcctttcaatgatggtggtgatgatgttggcgatggctgcagacattgattaagaagctatttcataagcagatatgattctcagtatcttgtgtggtttagaataaatattctaatttctttgtttgaaatagggtgttgctcattgcccaaaaaattgtgcttctcttgcttctgtctccagagtgctgggatcacttacatacaccatcacatgaggctgtattagagtatttaattctcacctcctccatgcctggagctgaggttggagcccaaggccctgggcacgctaagtacatgctcctccgctgagctatattctcagtcctcatcctcagcatttttatagatgggaaagttgaggtataaggagctttctcagctcaactctgtaattctcagacttcccccccccttccttttctgaagaggtgagagagcaaaggaaatgacttctagtcacatttttatgtcgtagggaagctgggtcaacgggacccctcagtggtcgtcctgaaagttgactggtcagtgaacttggagtcaggattgagtcacagctgcggtatattttcctggcggaaaacaaattctgtttttggagtctccaaggaaaggtttttaatgaagtcagtgccctctagtcatctctgactcatggcttcttcacttgggaacgttttctccatgattccctgatgttccttacacttaatgagctcctgtcctatccatctcttctcagtatgtgccgggtccgctctttaaaggcctcagtagctagtaattgatttacccaggctctaaactgggattaatgtagctctcagactttgtcagagagtttctttgtgtactggatggtggtgaagaagacactcaaggctggtcagagcacagagggtaagtgataatgaaagtgctcacccacaaataggagatctgtcaccatccccacctcccgaggctcaggagccacttaggaagatgatgtagcaggcttgtaagagccagcacctggggaggacaaggacgaaaccaagccttctggatatgacaggactgatggatgcactcacagcagctgtattttccccgcacacgatccgcacaagatcatctaagtagggggttctcgagccaatacccaacccaggagctatgcagagctgatggcttgtagaggagggagagccagttttctctaagattgtggctcctggtaggtcaaccatgctctagtggatggtcctacacccaggggtatacggatagcccagattggagttgatgggttatttacaaaaatggacaagaagttagggtgtagagaagtgggagcagatctgggaggagttaaggggaggagttggggttaatacaatcaaaatacattatatgaaattctgagttaataaatatgctttaaaaaatttactaataactacaaaggttgttaaactggttcaacaggcttttgtacaagatgcgaggagagccaagtatgaagtctgagattattttacgattttttttttttttttttatgtgggagctctggcttggcattaatcctggctcagatctgagtggctcctaaaaacctgaaagtcctattatgcttgaggacagagaaaatgcacaagaggaagggacaggtccttcctggattataagatttttgtttctgttttctgagattcaggaacatgacattgagagattaatggcaatgatggatctatctatctatctatctatctatctatctatctatctatctatctgtcgtctatataataatctgccttttgtgctggggagggagcccaggaccttgcatatggtagacggacactctactaccagcctatgcttccaggacttcacttaaaataaaagccttgggcagcccctcccccaccccagtcggaactgcatcccgttgacacaacctcagtgaatcacagttgcacatgttagaagcatcttggagagtagctggtccttcccaccgctccatgtgtcagggggacaggaaaagggaaccacagtgactagccaaggtcatgtagctcctgagtcagagcctatattccttttctgttttaaatgttatgtttattttttgtgtatgagtattttgcatgtgtgtatgaacatcacatgcatggtgtcccgcgcgctctgtatttctcgccagcaagaaatcatacacgggacactcggatccttctgcagacaagctttaatgcatcttgagagtgaaagagcataagcttcccagagcggagacgccgagccaagaatcccgtcccctaataaaggctggcaaccgccgcctcggacgtgtcaccccatgattggctgcagctcatccggccatatgacgccacggaataggcagagatcaaggaatggaaaattacccagcgcctgcgcaataatcttgtttacattcggtgcctgccggatgcaggcgccatcttgtaatggagaatgcagggacggctccctacagatcccccttttttattaattaatgataaggctttatatttttacaagcaaataggtcacccaaatgttgagggatagaggcagaggttgtaccttcccaatcaaatattaagactgtgtacaagagtcgccatcaggctgttagcttgacccgaagcgctctcaacctgtcctctgccgtttttctgggaaagggagactagggcaggcaacccttatgcaggacaacatgcctcccagagaagcctgcatattgggcaactctctgtgcaatgccttgctcgacatccctcatgggctgctcaagccaggcactctaccctgtgcaatgagcctaggctccgggtgtgcaagagctgtctggccagcggcctattgcttaagcatagttagccaaatatcagtggaagccccttgttccaaagctacaagcgcttgggcgataaccaccttgtctctcttagtttgagccctgagcctacagaccagccagagaagcaacatcaatccgcagcaaacggctgcaccaaacaatcccaccaccacccattccttaaaataggagacagctgaagcgatccatgatgacaatccctccgtcaaggacaggagttaaactggataatagcggctctcaactcccggggagagggtggagttctgacttttgaaggtccgaagaggctcttcgggttgagtctttctgggatccacaggggattttcttcatcctgtggaaaaacacatatagctcccctggatcttatgagaataggatccgggcctctccaaagaccagttaagacatctttccattttaccatctccttagacctttcaggttctgaggtatgacgcttggccgctgtatggccctgagcgtcggtgtttagaaaattaagggtaaagagtgccatggatattgcaactcttggcaccgagggtaaggatgctcccattccctccttttgtttgattaaataagacttaagtgtgcgatgggcacgttccacaatgccttgtccttgagggttataaggtaagccagtcagatctgtctacagaagtgctggaacttttgagaggtataagccggcccattatctgtttttaagaagcacacaggtggctaggtaaagtcttatttttgtaatacagctgaactttcttaaacagtagcttaacttctttttgaggcagggtattttgtgactttggagcctgtcctggaattcgatctgtcgaaccaggcaggccttgaactcataaagatactcccgagtgctgggattaaaggcgtatgccgccaacgccctaaacttaaaggcgtgtgtcaccaacaccctgagcttaaaggtgtgtgctaccaacataatagattagcatcttttataaaaacaagaactttacattgtcaggctttgcttaaaaataattctaaattgaagctaataaaatcaaacatttgaaaaactggttttaaaaagaaatttaaattcccttaaggtctttctgtaatatatagaagcattaacattttaaatcttaactgaaaaacttgtttctaagatggtacctctgatttccatgtggtcacctttagtcaagatggcggtttaagtatcctttttttaactttagcaaaatggctaccgtcagtcatgtgaccagctacaaaatggccgtaccaggaaatagaacattttaaaacaagcatacataaattacttgagcaactttaggatatgaggcttttcccaggcatcccaggcctccaagcagtgttgaataacatgcacggccttttcccctatcaaagactgggaaagccatctgtaattttctccgctcctctgatggtaaaaaggagtcggtaccaaatagtgggggtgctgatggaagtacacccgctggattaacaggtctcttaaatttaccggggtgtgaccggttatcccctattttctctccctccatttttgtttctttttcacctagctgagctgtttcctctaaaactttatctcttgagcttttagagtcatcagagctatcaagatttaaagctttaaacttatttacagaatcatctaacaaattattcactcccttgtcagtagacatcccaggaggtccttttttcttatttattgctgtttctcttaacaaattattcactcccttgtcactagacatcccgggaggtccttttttcttatattttattgttaggcgcgccccatctctcaccacattcggtttctgatatgtaattctggacttctttaagattgctacaatggtgagaaaagtcaaaatagctcctagtaaaagcatagaagcctctatattaacctcccacaatagcaacattcccaagccaaagtccagaaaaaacatacctctccgaatttaccaccctgcagttctgaatccgcctcgttagaggggtctccgcggtgctggagatgttcacatgttcccgggtttcggcaccatatgtcccgcgcgctctgtatttctcgccagcaagaaatcatacacgggacactcggatccttctgcagacaagctttaatgcatcttgagagttagagagcataagctttccagagcggagacgccgagccaagaatcccgtcccctaataaaggctggcagccgccgcctcggacgtgtcaccccatgattggctgcagctcatccggccatatgacgccacggaataggcagagatcaaggaatggaaaattacccagcgcctgcgcaataatcttgtttacattcggtgcctgccggatgcaggcgccatcttgtaatggagaatgcagggacggctccctacagcatggtactctcacaagccagaagatggcatcagaacccttagaagaggacttacagatagttgtgagccatcacgtgggtgctgggaacagaaccccggttctctgcaagaatggtgttcttaaccgatgagccatttctccaggccctccaatcctatattctttcctgcatttaaatatcacagcagagtgagatttgaaaacagtagtcttggatctatgggatttttttttcctttttgaaatgacacacaaatcacatttatgtgtggtttgtttcccgaggggacatctaaagagtggggcaccactgaggtatttagaaaccagattgcccctgaagcgtttggatattctgtgctatttatttatttatcaagaggaattttggcccacgcacacctttaatcccagcactcgggaggcagaggcaggtggatctctgtgagttcgagaccagcctggtctacaagagctagttctgggacagcctccaaagccacagagaagccctgtcttggaaactgccccccccccaaaaaaaaagaggaatcttatgttctcagaaaatttgtaggttgaatgtcactgctttcattttatttatttatttatttttattttttaaagaaacagcatgaaagaaagggaagaaggaaattgggtcttgttgtattccagactaggccattgttcattggcagagttgtcccatctcacccaattctcttggcagccaggccaattctggtgttctactttgtcatataaatcccactgaagtttatttgtatttacctgggctgctcactttgtttggttgtttaacttcgtgcctctttgtaatacctcctttctgggatatttgggctcagttgtcacacacagtcacaatactggccctcctttaaagaaccacacagtcactcctgaaactacaacggagttgtcagataaaatgcaggtggcacacagtaactaggacatacttatcctaaaaacagtttgttccttatcgggcattcgtaactgctttgaatcaaactccaatatctgcacttttatttgctaaactagtttatgccctccccatataaaactgtgcaacgcaaaatcccagtttcatttctattgttgagaatactggagaatccatactttatgccacaagtctatagtctcggttctttagagactgaggcacggggataacaagtagaggtctgcctgagaaacgtagtgagcatctgtgtgaagcaaaatgaaaggcgacaggctggagcctgttttcaatgggagttcattgcagagctgtgaaggtaaggctccttatgccacattatggcgactttgaagagccatctgtgatggctagtttttaaactgtcagcttgccacacttgtcaggtcagtgtcttaatgaggaattgtctacatcagaattgcctgtggacctgtctgggggtgggggtggggtacttgactattaattgatgtaggatgacccagcttatcatgggtgacagcagtccaggcagagcatcctggactatataagtcaagagaaagctagctgagtatgaagagaacaaagcaggagatgtggaggtatttatttctttactctcaactgtggataccatgtaactaccttgaattcttgtcttgacttctcccttgtgatagactgtaacatggaattgtgtgctgaaacaaccctttcctcccctaagctgcttttagtcagagttttatcacagaaaaagaaatgaaactagaacaccatcccaggatcagggacggtgagtcattcccagagggaatgaagtttttggtggcaccacaccatccaaccatcctcatgaccactcctgctctttctccaagggtgttaaccccaagagctcagtaacagggaacccatctgtaactgttgacaccagaggtagcccaagaattcaagatgctgagatgcagttctgccgtgagccacctgctcccggactgataatgaggacctcatgcctgcttctagatggatacagcttaggcctggataaaaagcagcagtgcagttgtcaaatctttgccacagtgaatgcagcttgtgctttagtggagggaaatacagtagcaggtagagtgcattaggcactagggaagcatggggtgggtggagagggaactaggaattaggacaatgggactgggtgactgctgcacgagacagctgatgccttgagaaatgcaacactgagtcattgcacgactgcactgagcatttaattggctctttacttagatgctgggcatctgaactcgggtccttaggcttgggttgcaagcactctatggatggaaccatctcagcctgttttcgtcctctgacttcatgatctgttctttgagactttaacctggagagactacagcagaagctcatttttagagatggcaaagttccctggtagcacagcttccatactgaaaccaatcaatccagagcttgttccctgaaccgtctccttatcacaccctaacacatcagttcagtttgtcctaaaccagcccagggccaggaactggacagctaggagtcatccttaagcccagggcctgctgatgccattgtttaatcctaagctgtatctgctctctccttccctgctccttccagagaatgacccagtcaaacgctctagagagtcctccccttatcctgcatatgtcctgtttcttgaatcttttgacaagaaattttttaaatttcttaatgacaattgttcacaagcctgcttgtcaccctacctgactaaaatgaatcccgggtacattttaaacactgaggtggactgtaaatttggccagaaataactttctttctttctttttttttaaaaaaaagcaacctgagcactctcctgggatatgattggaagcttgggtaagggcctgggagaaagaggggtgcattgctgctgcagctctgagaagcagagaaagcagcggcctggggtcaatgagttagaagccggcactattgtgacagaaagttgaagaaaagatcagaaatgcaggaaaatgtgcagctactctgcaagagtctgcaagacactgccttcgcggaagcgatgggaacggagccagggcagagaataccagtgttactggaagtctaggggtgtgctcactcaacgcacccgcgatgactaggctggaactgagtacatgataaggagcgacttgagggaaggagcgttcatttagctcacagtttaaggcaacagtccttcctagcagagaggcacggtggcaggaaccactcttagccgcggctgcaggaaggtgaggctgcttgctcacatcttagagaatcgggaagcatactgatactcagctggcgtttctgcttttagacagtcaggatcccccttgtagagcagtgctgggcacacccggagtggatctttctccctctcttcacagacacacccaaaggtgtgtctcctaaatgtcccaggtactttttcgtgaagctgacaatgacaacaattacgggaagcaatgtacccagatgcagagtcaccaggaaactggcaaacgtctggttttatttgtggggatgttttggaagaagattggtgtgcaggtaggagagccgtgcttggggtggcagagacccgccctgcagatggacagcaccatccagtaggctgggagcccgatggaacaaaaagcggaggaaacggggacgccctctggtgcactagttaccgttcttttttttaaaaatattttatggatatgggtgttttgtctacatgaacgtttgtgcatattgttcattcataccctgggagaccagaagaggtcgctggatctcctgggacagaaggtggtgcgccaccatgtgccggggatcaagctcaggacctttcaactgctcagccatctcttcagccccagtagtttatttttaaaaggctcacctatttgtcaaaataaggtttcacacccttctcttggaaatcttcaatttgaatgttgttgttgtagtactttttttgttgaaaatctgtagcaggaataatgtgtgctttccacctggaatcttataaatgtatattgctccccacccctgtagaatgcgtcagaggtcatactcttccacttttaagggggctctgggggtcaaactcaggcttgtggaacaagcacccctgactgctgagtcatctatccagctgtgaaaaactttcttaagaaaacattagtcatgaggaaggaagtcgagctagcggtaaactttccctgactcaatgactcagggaaaatggcccagtatattccatttttggaaggagagagagaagcaaattatgtaatattacaacaatgaagtatttaaatccggtctgtagcgctgttggccgaagtagcgggattcagacccaggtctaatccacacctttatggcggtttctgtccccccagttcgtttgcttcttggtgtattgtgaaccccaggaccattagggggaaactgcgcaggccagcaggctgggctcttagcgcagcctcaatcagaaacaagctggttctctggttcctgcgtcaggtgcttccccttccaaattgtccaagagtccaagagtcatctttcctcacagagctactggttcgcaagtctgttgtaggatagatttcagtgacttgacgggaaatagggctgcatcccaagcaccctgggagatttcattactgaatgccggtctcccaagagactgctgggaagcttagtccggtccagggtcttaattagcatagccacctccctgaaagctctttccaggcctttgctaacagcaagctactttcccagcaccactaagcggttaccgctcgcctttctgttgggtcccctcctgtttgggggccacggcttctgaatttgaggctggctgcctctaggtggcagcaacgtaccactttccgccgctgaatgtgctcggctagaatccgcttctcttccatccagctaattcgagaaagcaggactcagctgaacttcccccagcgatgtttctttcctgctcaggctccttcgaggcgtcttgtggttttactgcccgagccgagacccactgttatctgagtcagcagaaggtgggaggacaggctagttagagacagaggggaaagaatggaaacgggagaggtgatggcgaggaaggagcccctgccggccttggtctccgacctggcctttgcagaggggcagctgcgggtgggagttgcagcttctcgaagcagctcaggggctctgcctgggtaataagatgtaccacagagagaaggaaagagagctttaccctcgatcgtgacccgatgccaggctgccacacaggggcgactgtggctcactgcagctctcacatggtttcacggacagggcacagatttggaaatactctttgtgaccctgtgaaatatgccacctccccacaggatcgcacaaggatccgatcctccatgaaaggcgtcagacgaataagggaacaaaagagggttgggagggcagtggggctgccaatctgcccctgcctgctgaagatgtggtggccgtctatgttactctcctagtttctaccgcctgtgttaggtgactcataactgcctggaactccagttccaggggacttgatgccctcttctggcttctataggcacctgcatgcaacaaatggacatacccacacacagaccatacacaatacacatgattaaaaataataaaatattttttttaaaaagaaagtaatgttgtctctatgatatcaaccttcatagcaaatgttaattgtgccggagttcttttacctctcctttatgtgcatgcgtgtgcatgcatgtgtgtgtaagcatgtgctcccatgtgctcacatgctcaggtgaacatacagagggcggaggttgatgtctggcttcttccttgattgtcatctacttgacctactgagacactctccttggacctggagctggcctgattcagcttgtctagccaggcagcttgccctgggcatcctgtgtctccacctcagaagcactgggatctccggtgggctctgggatccaaactcctatctttgctctgcgctttgtccactgagtcacccccagtcttccatgctaaaagtctccattctcggggatgggatgcttcagccagactccagagtggtgaggccttttctattcccatgcctccttcttccccgaggttcctttctgaggtgataggtcaagagggacccatgaagctctcatgggaatagattagttactgtgagaagatacttaggaagcaaactgcctttgtgtttttttcctttggtgtgtatccatttgttcctttgctttttttttttttttttttttttttttttttttttgccacagtggcctgtgtggttgcctgatctgggacctataacttctacaaccatgcaacaaagaaaatcacggagggaacagaaccgtgaaaggatctgtgaggagtgagacaggtctttatatttttctctgccttctagaggattcatggaatcctcatgtctccatcagtccatatgggaaggcttactttctgtggctcttagaagcttttcacctgtgctcagtggctggcctgagcacccacaccaatgcctgccttgtaggaggaagccagtgaacatttaccaagacaacaatccagaatctacacatatccttccagcctcagctacttcctggatccatcagggactcaccactgtgggtctcattcaagacatgtttgttgacccttgaatctgtgctggctctgaaggggaggcaaatagttaggagatgaataaaaataacttttgaccttcatagtctaaaaggaaagagaggatacacctgggaataagtaaaaccctctttggctttctccagacgagaaaatcttgcagacatctgagtgctttggaaacaaaccttcatgacatttgataatgagtgaagcatgtatttttaaaaaaggtacattagggctagagagatggctcagaggttaagagcactggctgctctcccagaggtcctgagttcaattcccagtgaccacatggtggctcacaaccatctgtagtgagatctggtgccctcttttggcctgcagggatacatgcagacagaacactgtacacataataaataaatcttaaaaaaggaaaaagaaagtatatttttaaaaagtacattaaaaaattaagccctcgctccaatcgtcactggctgcaacacatgggagagtgggcactagagctcgccctggtggcatgggcaccggagagctgccccaagagcatgagtgcaggagagctggctctgccccttgctggccttgtagtggcacaggcaccagtgagctggtctcaccaggcctgtgctggagagctggctctggtggtgtgtgaggggagagagctagccacgatggctcaagctgagtaaagccagtctgccctttgccagctgccacaggcaggagagctagctacaccccttgcttgggcaaggccagagctggccctgatggtgcaggtgcaggagagcaggctggctgaccaactcagctattacccagtttcaggtccagggctttgagttagcccatcccaacaactctctcttccctgaactgctggagctcatgaaggaagctggctatgcagagccaaagctgcaggatctccctgacacaggacgacagcaggagacaggaagggaatcctgagtgaggatcccgtactgatggtgtagtaaaagccagaggtctcagaccagaccaatggctcattgcaatgaaaattggctagtaaagctgtttgggcaaaaggttcactgtatgacacagcctgacataccatagcttccatggtgagattttttgtttgttttgttttgttggggaggggaggttgcaagagcagaaggcagatattgaggaatggggagatgagtcatattggggtgcatgatgtgtaattcaaaaagaacaaaaagttaaaagatacaaaaatttctgctaaaaaatggagaggttgcgacactttgtctggataaaatactttaatgattccagcattttaaaacatccccgtctacctgaactagattcccttaatttaggtgacagtggtgcagctgggacaatatatgaggccactggcagtggctccaagatctaactctcatgaacaaactgacttagtggagcccattctatatggagagacaccttgcccagcctagacacaggggtgtgggggaggagaggagccttggtcctgcctcaactagatgatgggacatgatgtagacttcctaggggaggcctcaccttcttggaggagcagatgggaggtggggggaagggaggggaatgagaggagaggagggaggggcaactgggattgaaatgtaaaaaataaattaataaaaaaggcaaaaaaccttcccagtctacaatgttagttgtaatttcactgatgcttagtttattttaccacatagtatatatagctcaattaaacaccatatagaagctaaaaaatattaagccctcttttgaaaacacacttaattgtatcttttaatttatctttctgagatacctcataaagcctggtttgcaacttattttctaatttcctgacagagtccccccctaacaatgacataaggcacctgcttcttatattgctgccttggatattaactagaaatcaagattccccttatttcacaaggccctggatttgattctcaacataacacacacacacacacacacacacacacacacacacacttctctctctctctctcataacccctcacagtttaaacagacatctaactcaaaaagggaattatgaacagccgattaccctggctcccctaagggcttccaccttctgtgatgaatagcttctcctagctcactgtgaagatggaatagatagagactttgagttgaagacggtgctgattttgtgcgttccatgtaaatgcggcactcacacaagcagatccataatggataagaaattggctggaagtaaacagacagagcaacaagccgacgtgcagaataggtgggagaagcgaagcgtgaggaatagctagaaggatgtgctttacgggatcacaggaagagacgtcctgacaggtgaagccgttgggacattcatggggtcagggagacctggggacatccagcctggggtatcaggtggatgactgaggcatctgggagcactcagtgaccaggctcagaggacatgtaaaagcacaagtctgccaatgacattgaaggtcgctgcagctccctggactccagtgtcttctgctgcctcagacagatagaccagacagtcagtggctctcagtcactgctgcagactagcatggcctgggggcttgcaaaaacaaatccacacagacagacagacagacagacagacagacacacacacacacacacacacacacacccctaaatgcatcaattaaattggggtggggcccagactggatatattttgacaactttcttgagctgtggtttatgtgttataatccactccttgaatgtgtagaacatgatgcctctaggcggttcacagcaaccatcgtctttacctaattagagaacattttcaccaccttaaaaataacccagtgtacctattggtggtcactccccactgattcctccaccaaactctaggcaactcttactttctgtctacagatttgcaaggtagcaaatggctagataatgcatatttctctgactggcatttttattagacataatggctttatggtttgtccatgttgtagcaagtgtttgtctggggtggtttgatgagaatgtccccagagcctcatataatttgaatactcggtcaccagttggtggaactgtttgggaaggattaggaggtgtggtcttgttggaagaagtgggtcactggggtgggctttgaagtttcaaaaacccatttcattcccacttagccttcttacccagtcttgcctccctcaccttcaaagtatggatcaggacgtaagctcttagctactgtttcaacaccgtgcctgattgctccccagcaaggtgatcatggattctagttagtggttagccttaacaaatggcttcttttataaattgccttcatcaaggagtctcttgactggaatagaaaagtaactgagacacagtcctgaatccctctgtatgaccagctaatattctctcctgtggaataatctgcctgggtttggaatctctgagaagacacacttgtgggtgtgtctgcaagtctctatacagataggcttcactgaagaaggaaaacccgccctgattgtgaatggatccctggggctgtgctcctgaacggaatacaaaggagaaaagggaggaatcaagatgaacaccagtactcacttccgcctgcttcctgactgtgaacacaatgtgacttgccgctctgctcctcacccttgacatcatgctttccctgctatgatggattgcaccctcacactgtgacccaaaatggaccgttcttccctttagtttctctgttgtgtattatgtcatagcaatggaaaaaagcaatgaatacaatagctttaaagaattccagggttggggtgtttagtttagtgttagaatacttgcctagcttgtgtggggctctgggtttgattctaagcactggaaaaaatatctcagaagttctaatgagatgctgtgattaagaaccactgatcgttcttattaaggctccactgggatcctcagtacacatgggctggacagactggggctgaacagatgaccagctgaagccagttgccaacagtactgtgcagtgcgtctaccccacagtcgtgtgttgtggtgacgttggttacttccctctgaggagctggtagtgtgtgaggctgcaatggtgcaccagagaagggtgataccaagtgaggtcccagggtttagagccctggggtgatctgacatcccagcaaggggcctcgaggtttcagtaagtcctggaagtctgtccttcctgtagacaaggaagagatgaggaagatatttctaaaacccaaaatggttccgtggtggtctaggcaaagctctcaatccataaaagacagcttcagtcctgagatcctagagtaggatttctgaaggagcccacttgccactgggcagaagtctcccacagcctctccagagcctttccacctgtattcagcagaagagcccagctgggtcccaaccaattagacaggttggcattagccctctgaaaccgccatttgctggggaaggaaagatgggcccacctgttcccatcctgtttggaatctttattgcaccctggggccgctcagcagctgttgaggccattgacaggaagcaggcaaacacttctgtccctgtttctctacccccctttaaacttgtgaagaaactgatttgaacagtgacacaggactgaacttcaaaagatgaaggaacaaaaactcacagctgtacctgagtggagctccctggccccaccttctgaggcctcctgattctgtccagggtccttacacttactgttgattctattacatgacttctgtctcagtttccctgtcttttcctcagagacaccccccccacccccagcacttcatctcaatggggcctagtccccacttctcacgtggtctgggatcctgtcactcaccacgatactgcttgcaggtctatgtctgctccatcccctgtgttgtttatcacacctccctccgctagctgggatgttctgtgctggagttactcttactgttttcttccaccgagagcctggctgggatgatctcagaatgtttgttaggcaccatgagtgtggcttaggggtagagtgcttgcttggtacataagaggtcctgggatccatccttcgtactggacatatatgtaaacacatgataacacatggatgtgtatgcacattcttattactggacataagtgtgtgcatggatgtgtatgcacgttcttagtactggacatatgtgtgtacatgggcgtatattgacattcttagatcaggacatatgtgtgtgcatgggtgtatatggacattcttagtactggacatatgtgtgtacatgggcgtatattgacattcttagatcaggacatatgtgtgtgcatgggtgtatatggacattcttagtactggacatatgtgtgtacacagatgtatattgacattcttagatcaggacatgtgtgtgtgcatgggtgtatatggacattcttagtactggacatatgtgtgtacacaggtgtatattgacattcttagatcaggacatatgtgtgcatgggcgtatattgacattcttagatcaggacatatgtgtgcatgggtgtatattgacattcttagatcaggacatatgtgtgcatgggtgtatatggacattcttggtactggtcatgcgtgtgcccacagatgtagttgatgagataattagatgcatgggtaactggaaggattcctgaagccattcttgtgtcccttaccagtcactcacaggtgctgcccacccgtagcttcctccgtggcctctcagacatgcctgaggagtcagctgactttcgccactgggcatactggcaccagatctgcagacggggattgctcttagagcctgggcctcccaggagttaagggagcatacagagaagtgaagcaccttgttcatggccacacagccagtaagtagcagagccacgacccgagctcatgtttcctgacctgagcatctctgtgccttgtctgtggccctttgtcactggagcatgacacagtgggaaacagcagtcatcaagtccagcaacacctaggtggctaggtaggggtcagggcgcacatagacacaggcctgtcttcatcaggaaaatagggtacagaagttgaaagctgtccatagagcccccattcctttcgttgggactggtttggggaggtgtaaggatcattctgaccatagaatattttctcaaagactttcatagctctatactcccatcccatatagcacgcagtccctacaagactttatttatttattcatttatctttgtggtgctgagggctgaacccaggaccctgtgcgtgctgagcaagtactctacccccgagtcacattcacagcacgtaaaataattattcttttccccaagtcttccacaataccattgccccctcttcctgctcccgaagatttacattttaagacatcttttatccagtctactttctactgcacactgcatgctgattgcctcagttttgcatagttgtctaaaaattattataaatgctagaatactgtaagtgttctgtttctttatgttatgcttgtgtgcattgtatttctgtgtttgtgtagatatgtccacacatgtgcaggtacccatgtgtgtaagtgcatatggccgccagaggtcagcactgggtggcctcctcagtctctcttctccttgttctttgagacagggtctgctgctgaacctggagttcaccgatgggctagactgtctggccagcaggtgataggaacctgacagcactgggttatagttctgctgataaacctggggtttacgtgggagctggggtccccattcaacctaacaggcttgtgagcaggaaggttatggcctaggctgtctggctcctcagcctggtgtctgtgttttctgtggtcttgatggcctgtccttctgtctatcataaagctttttgacagatatagcttactttgtccatttttctaataaggacctctcggctgcctcaactgtgctatgaatacactcagttctacgattctctttgtgcccatctccttgtaaacttggataacctctccaggacacacgcctaagattgttgctctgagccctgggaaatattccagaaaactcttcccagcaccgctctagctaatatccccatcaacagtgctcacttgttgctatgagcaaggttttcagagggtgaggggccttccctgtctcccttttcacctcaggaagaggccagcctgcagaagatgtaagagtatttggtgagggatatctgtgactcctcaaattcattggcaaggccttgacagctacacttgagatcctagatcagagaagggcctgagattgtgtttggcaagctcacctgtcaggtaagaccgggtctccagctttgtcatctggtcactgtgggacctgagctatttgctttagtctttaaatcttgggcttattctacaaacttcctcataggattactgtgttgattaaaaaaggtctctagtgcatgaaaatcacccataagcgttcagtttatgctgaagaattaagtaacaagagctatgcgatttcctgaaaatattaatattcctaatgactttggaggtgtgagtcctgggagatgtcacagcctgagaagggctacatcattcagaatgctaagaccccaagtgattgggaaaaatcttgccatctgccctccccttcctgctggccagtctggcaaagcatcaagaggtgagcgtggaggcctaactgtggccaagccccttttgctacacttctcttggtgaccccagcattagagaaaaatccatgctcaactaagggggtttaagtcctcagaggtgagtggaatagacttagaaaagagggcagaaaaagcagaaagcagccccgaaagcaggttgggactcgtctcctcatcgaaaagcctttgttttgtttttagacagggattcatgtagcccagggtggccttgatctcactacggttggctgaggttgttgttgaacttctgatcctcctgtcttcatctcccaagtgctagaatcagaggggcgcactatgccggccagccgctctgaaggctccgaggggccgatagcctctacttcccacactgtaccctcggttgactattttgctcttggagagttgcgaacagttgtttgaagggtaaggaggttaattgttttaacttgagcagagcaaacttggaaagtgagaaattctccccattccaataggtctctggtccaaaaccacacctggcctcgcatccctctaatgatagtccccacagagttccaggtgttcagcccagtgactgattaccagccctgcagagttcagagggacaagatggaggctatatataaacctcacaaagtttcaaaaggtaaaaagatgcatgaccgattatgaacgcttacatggctccaggagaggctttttatttttgccccggtggacactgtgtctttgttcccctttggaagacaagaggatcctggggccacagttccccatctgtgaaatggggtgagattatcctccctgtggaaactcgtctgcccaaggccccatgggaggcacagggtctaagagcaaccccaatatgcagacatgatgccagtattcccagtggtaaaggcgcctgggccagctgatgcctctggcttgtctgagaggctgtgcagggtcctggaggtgtgcagcacctgtgagtgctggcagggtcatgggcaaggctgcagcatggtgacagtcgggggagggcgaggttagcaggcagccctgcagcaggcaaggctgtgggtcttggaaggtgatgcctggcatccggctctgattcgtctctgctgtattcatcgaaccacacagacgggcagaaggagtctaatgcagggtaatgccaggaaacaaactcacaaaagtcaggcaaggtgaagcagacttctctggaaatacagtctcttcaatgaggaggcaacatggtagagcttgtagtgccccagctggtgtggatcggtggatcgggaggattctgggcctcactggttggccagcctaacatatctaatgggttctaggccactgagagacccatctcaaaaaaaaaaaaaaaaaaaaaaagctggacagcacccaaagaatgacacccaaggttgttatctggcctcacattccaggtgtacacacacacacacacacacacacacacacacacacacacacacacaccatacatgtgccatacacattataaacacatcatacatgcattatacccaccacacacacatcacccaccacacacacctacaccccccgcccccccacacacacaccagaatcctagagtagttctagggtcccagaagtaatttcttttgttttcctgttagggtaaatacttttgacatcatcaggcatatctaattctccaagttttcaaaaaattactgtattcatctttatcatttggggtatgtgtgtctgtgtgccaagacacacacaaggaggtcagggggcaactttcaggagtcagttctttccttccaccatgtggatcccagggatcaaacttacgttgtcagatttggtagcaagtatcttaacccatggagctttctcctcagccccccttttctttttagacagggtcttttgtcttatggagccctggctggttttgaacatttgatgaacattacgcttttacattccaagtgttgggtcataggtgcctgctaccatacctggcctagttttctttcatttgggcaagtaaatacacacacacacacacacacacacacacacacacacacacacacacacacacacacacacacttagcctatactcaaatcgtcaccatctgtcagtgctcagaggtaccccaaagtccccagagctctctccacatggcaaggtgctgaagggtgaagtgtggctactttgacagggctcctcaggcataagcagtgtaacttgtgtggttctgtgtggtgacccagtctccaacatcgcctgtgtgatgttctggagtgtgatcctattctttggcagtttaattgaggagatgaactggcgggtgtcggtgacggggtgctaggctgcttgtactgctccaggaggtctaataggatttccttctcggattttggatcataatatgtcatcaggcctcacctgactttaaacctggcaccacagaggcttgaaaaccactgattgctatctgctgtgacccttagtcaaaattctgttactttttgggagatgtcaggaagaggagccaggagacaaggtccctagcccaccaaggtccctattcacaccagggaactcacggatgacccagagggtggctgctgctccctgctacgctcacacagctgagtttttcccagcagggctgtcacaagtccacctgccaacgtccacctctgcctcttgggaaaggaaactaagagcatgcgaagttgaggtaggaagaaatgacccagcaagtcaaagcccatttcagaagagataaaccacttgaccactgtttcctctctcttcctactttcttgttcccttcctctattccttttgctttctctccccatttccgttcctttcttcccttccctccctcagtgccttccttccgcccttcccctctcccttcctccctcctccttaacaagacctgagatctcctaaaagtggtaaacaaatttctgctaaacaaatattggttgtgtctaaataggcacaaataaagtttgtcctgctcacctctcccacagcactgcaaagttaactcaagcccagacagaccacactcccacaccccgtagtgtcatggctttaaaaagttttgctcatggtggagaggtctgaggtcctgtgaggacaaaagctggcagataagagacaggcctcttagaatgtcacaacctgtggtaaaaccatggcctttttcttgtccttaagaacacggagttaaaacaaaacagacagaaccaggcaaatgagccaaaaccctagtgttagcaggggcattctgaatcagtgttagcaggggtgttctgaatttctcttcttttcctggctgtataggaggggttttcctcaggccacaaagtagtccttgaaaacacagtttttatgcatttattatgttattttgttttttctccttcacgtttctcctctggcacgttaagtttcattatattttcgtgtttgtttttgtttgtttgagacagggtttctctgtgtaacagccctggctgtcctggaactctctttgtagaccaggctggccttgaactcatagagacggacctgcctctgcctcctgagtgctgggattaaaagcacgccacccggcttcattatattttcatacatgtatataatatactttgatcaaattctgcctcccattgccccatcttgtttcttctttcctctgcctcccattgccccatcttgtttcttctttcctccagcattttctttttaattaacacacatatttatggacatatttatagagtaccatgtgattttttgttgtttgtttttgagacagggtttcactatgtagctctggctgacctaggactcgccatgtagaccaggctggcctggaactcacgaaggttttcctgccctggcctcctgagtgctgagattgaagacaagagccgctgtatctggccctcgtgatatttgagacacacataagcattgcgtaatattcaaaccagaggaaactgttttctcctcaaatatttgccttcagtatgaaaacattcaaaatcctctaactttcttttaactaggaatgcatgaaagtttgtttctcttttttagtggaggggctgtgaatggaacccagggcttcccggatgtcaggtaagtggcctcctcccggccctgaatacacttgacatgattacatagtatctcttctttagctctcccttcatttatttaactggacccctactactgtatatgtaggtttccaatttttcagggtgatgtgtaattctatgattaaatactcttgtaggtccttttcagatgtcacctgggactgaacaggtggcattctctcaagcccccaattctaggactggtgagaaccaaggagcctcaagctactgtcagtgcatgggtccaggtctcctgggcaccaatgctgtgggctcacctgcctccttccaggacagtgcctgctctgacttcctttgccttccacctaggaagccttgcacagggtcctggagtggcctcttcttcccttccataatgctcatacctgtccaggcgcccttgtggttacacagaactgtgatcttgccttttttattttattagtttttttttttaaattgaaattagaaacaatcttatcttacatatcaatcccagttctctctggctgattgtgaggccacttgagatctaagtcctttaggagtagagctcatctatacaactatttttgttttgttttgttttgatcttcttaacaacaacaaaagtgctaccaattgttacttatcagacttctgaagagatcactgttagagaatgaataggtctaagaattaaaataccagaccctgggaggagctaaaggctgagcatcaaatttggggataagggtataaataagggcacttagaggcagaggtaggtggatctctgagttacaggccagcctagtctacacagtgagctccaggttatctagggctaacgcagggagaccctgtctccagtgcaactgtttctgctaatattgtcatactttagaaaccgtgttttactgtgaatagtcaacacttgcctgtccacaggggacttttctcttctcacaagtttttatttttaatttttatcgtactggattgcataagggcattttcagacaaatgtatgattgtctttgaacatctgcccctcatatcccattaccctctccctatcctatgctccccctcctgtgcagtgtggaggtacaggaagcccagcctgcagggcagatagctggaagtctgagtcacgcgtcctcaccatccacccaaggacctggtgtccctttggctagagtgatactttctctttgtaaaactattgatcttgctgtcaatggttaccctaagctcacctcatgtaccagggaaacgagtgacaaattcagtgactaggggacacagaaaaggccatctgtgagcgagaagacaccctgagtgccttcagagtgtaatgttgtcagtagatggggcagtggctagctggctcactgatcctagcagaactgaaatttagcacaaggggaagtttataaaatttgcatttctttaccaagtccctggcttgacaacagttcttggcttcctccatgcagctgcgtagaagcaacagccaaactcatcttgtatttgatgagtcatcctgcatcacccatgtgggacagacacccaggaactcctgtggctgctgtgtcagcctgctgcttttccagaagatgaagtagagagaggcaggggtgagggtacatgcttagcacttacaaggcagaggtttcatctgtgacactcccaactacaccaagactctattcccagccctggaaacagaagacacataactaatttctcaagcccaggacaatcagacactgtggggtattgtgatttaacttcccaagattcctatccattccttattgttcacttgctggccctaggtagaaagaccaaagagactggctgtacttacatcacaaaaacacaagtgagagggtttggtagtaggtatatttaggaaagcatatgacagtgtgaatttgttctctttatctattctgaggccagggtttcgtgctatgttggggttgggcatcaaaacaggttttgagtttttgaagaagtttaaccaagtgtgagcatagggtccgcttctctaaggtcccttagtgttcttatgtgtatgtgcttataaagtttaaatgccattttttggttttattttggttttggtattgggaattggactcagggtcttccacatgctgagtctgggctccagcactgagataccccggctcctaacagtcacttttttaaaaatttgtttttatttttcaagacagggtctctgtgtagccttggctgttctggaactcactctgtagaccaggctggccttcaactcatagagattcgcctgcctctgtgtctcgagtgcctaatagatactttttatttgccttaacttatatgaacctcaggaaagtataatagccatatttaccacaaattacatagaaaccagccacaaaatgaagtgatttgttcaagtgagagtgacaaatggctgtttggtgcttaaatatgctcctgtctgtgttttccccaagaaatattatatgacttcctgagacgccttaaacaaaatactgtcgaaatattttcagagagcctttcaaatattttctacagccctccctgcattttgtgagggtcgggtttgtctagacctgcatatccccaacatggccacaagatgtcagagtaatctcgatcattgagaagctggcttcatttggggcaccagtagagggcttaggtcctcttttgcccaagagaaatgaaaaccataaataaataataaacaaaacaatcaaataataaaatcgaggaaggaagaaaagaaagcaaaaaggccttgggtgactacataggttaaatagaatggtgggaagctcatgcggctttcttccctttccgttttaaatcaagcaatgagagttagttcaaaggagcctctgtgtcacctctgtttgctcttggaggcaggaggtcaggacttgggccagccccttagcgtacattattcatctgtccagctccagctctggaacaaatgtgaagaaatgaagtcgcttcagtggaggggagacagtgttgttattgttgctggtgacggttctatttgccaacaagcataaaaacatactttggaacccaaacaggcctgtcagagggaacttttgttccatgtttgggctgggacgcttccagggcgaaatcgggctggcatttgaacttcaggaggccaggagagagctgtgcacagcagccactgacccgaaaggccggccatcagctgcagttttcatctgggtgttatttgaccgcggtccatgcagcttgggctgccaactggggtcactgctgtgaatgaggaaggctggccttcactttagggctttggagagagaaagtggtcctgattctgcaggatttatctgctgttgggtctcaattaccccaagctcgctggcaatgcctacaggatccctttgctacgtggattaactaccctggggacaaagccgtctttgctgtgtagggcgagagtttagggcagagaaattcttggtaatgccagtctcaagaagcataattcagaaagcctatctgcctttctctgctactgttacataattcaagctgaaggtcccatccgcagctgtcgggcacctcctccctctgcagatgggagaagctcgctggatggaccggctcacactaatctatctatttggaaagcggggtggtgataaattatgaccatggcgaatatcattaaaatgcagtagcgccaacaagcactttgaatgtgaattcccagttctcccgcacaactcggcaaggctgtcttggacattctaatttcaccttgaactcccatgctaagctcttagagactccagatcccaaacgtccctgtctggagtggcaagctccctacaggaggagcctgggagtttcttattttggatgagcttcttattttgtaagtaacaactcaaggaaatgaagtgattgccccaattatgcacctaattggtggcagattagggacaagagcacagcccattactgctatttccaattccactctcgctgtcttgaatttaaacacacctttagctttattttaacgtaataagtgaattaatttattgcagatctggggctggaactcaggtgctctgagcaggctaggcaggcgctctaccactaagctgcattcctagcctgatttatttacttcagaaagccttatttcaggctccagttttctttccacagtcaggccagaggccacccagagcctgctctgctcccagcctccagattcattcctgtctcagccacaactaccataccttgtaaacctcagttgactctaaagcaaataaagttaatttttagcatttaaccctagatatgtgggcatttaggatggactaggtttcatagtgaacacggcctggcagacttctagaaagagccagatagtcagtattctgggtttggggcaccataccttagataccaattttagatgaaaagtcctttgtcatgatagttcctggcatgaaaacagccaaaatatacaaggcactgggaatagaggctcatgtatgtaatatcagcacttgagtgggtgaggcagaggacaatcatgacctcaacgtcatcctgggctacacagtgaattcaaggctagcctgagctacgagaccctgtctcaacaaaacaataaacagacaatagaaaaaagtagcaacataatgtatgaggtgaatgagcatggcttcccggggataaatttggctctcaggacaaaatttgctatttttacaataacgaactccattttgagtttcttttcttcagtgcattacggtctgagctctgtctttatgtattgttggacttgagcttgtgagagggtgtctaggtcagcttgggctgctttgacagaagactggctgcctcaaacaccagatatttttcacagttcaaaaggctgggaagttcaaggtcaagtggctggcagacccagcatctggcgaaaaccctgccagcccttgtaggtggctgtttaataattgtgtacccacgtgtgtgtgtgtgtgtgtgtgtgtgtgtgcgtgcgtgcgtgcgtgcgtgcgtgcgtgcgtgtgtgtgtgtgtgtgtgtgtgtgtttttgcaagctcatgtgcgtgcacacacgcataatcttcctcttccttttctcctcttccctcttcctggtttgtttttgaaaaaagcatccccttgtatagctaaggctaacctgaacttcactgtgtagctcaggctagcttaaaacacacagtactcctgccccagcctctcaaatcctggaattacaggcatgagctgccatgtttagcatttatgtgtcttttaaagatattagcccctcttattggtgccccttctatggcctgctctaagcttagaattcccttccccatcctcacagcctttcacttgggggacaaaggcttcactatgaatttgggatggaagacaggcacacaggttcactagcagatggaactggtagccaagtctgaggatgaaaaactgaaggcaggaaaggagggagactagactgtctagtgagtgtcaacaccagtgttaggggccttggaccaagcatcttttttttttttttttttttttttaaatcatcacagcatccaggaggtaagcaccatgcttaaaaacatgctcagtcaggcttgttagcagccgggctgcatctaaactagaactactgattctagatagtgcttttcaccagttaggcaatggctttttaaaaaaaattaattttttactttagaagcactcttatttacatatcaatttccccattccctcaccccccatcctcccatgctccccaccgatcccccacccagtcctcaaggatagtgaggccttcccacggggaaccatcaaagtcctttacatccttttggggggggcaggccctccttcccatatctgggctgcaatagtacccctccatagtgaatgggctcccaaagtccatttgtgctctagggataaacactggctccactgttagaggtcccatagactgcccaggcctcctagctggaacccacattcagagggcttggttcggtccaatgctggttccccggctttatgactagggtctccatgctctcactaggtcaagtcaactatttctgcaggtttctccagcactatcttggctcctttgctcatatctggaactggattccaggagtatggctcagtgcttagctgtgggtgcctatttctgtctccatcagctactggatgaaggctctaggatggcaaccatggtagtcatcaatctccttataggggaagggcatcaaaggcagcctctccacaactgcctagattcttagttggggtcatccttgtggatccccgaacatttcccctgtgccagacctctctccaaacctatactggctccctctatcaagggatctcctttcttgcccttctcgtgtttttttaagaaatctgcttcctggagggcatgggatggaatctgggtgattgggctatgctgaactcccatgtcctcattttctgcctagtaaatggtcgttgaacggtaagtgagtacttgaaggattaggaacttttatttgtacatttatctaatgttctcttttaaaaatcactgtttttacaggggctgaggattaggttcgtggtggggcagtcgcctagctgaaccacaaatcaaaacacaaaaacagaagagaaactttctactcttgtttgaagtcatcgtgcagctcagattgagttattaggtgcaggattcccccttattttgcggatggacgtcaggagtccttggtggcagtaagagtcctccccagcataaagggaattccgagcttctccaaggcaggcaggtgtggcctgccgctaatgggcgtggcctgtctttaggaggaacctggggagacccctttctgtagtctaggaggggtggaggggtgaccagctcatttggagaagtcccatcccttctccatttcactttccgagagaggagggatcaggcagtccccatggcctccagttagaggaacctggggctatggtgggctctccatggtgaagtcattagctaaaaatgtgagcaggccctggcttccgggatgatccggaggccttcctgggtgtggaaaccatgccacactgtgccacgacttctccttttgcaggcagagctcagttcaccctcacagcaggttctgaaggaaaatttccaacaggtttggaggccccagtgtaggcaatacactaggtactcccctcaacctccagacctggttgtaacagaggtttagggcatggagggtggaagctctccatgcttgttttcgtgtctgtaaactgaggccaggaagtgaccttttcaaatacatattccctttcaaagagtcctagggtttggagggctaggactgctgtcttgtatttacactacaaagcatggttctcaacttgggggttgaaggacccatttacaggggtcgcatgtcatatatttacattatgattcataacagcaaaattacagctatgaagtagcaacgaaaataatgtacggctggaggtcaccgcaacatgaggaaatgtgttacagggtcgccgcattaggaaggctgagaaccaccgacaggatccaaaccctgatcacacttgtttctgagttatccagtttttgttttaatttaatgatacatttttacatacagttctcttaatgtcgctgattacagaaaaactctgtgttatacttgttttaaactttttaatgctcatacagatttttctttctcatctggtgatccagtaccatgcatctactcttaatgtttttcttctttttaaaaccatttattggctggaaagtaatagattggcagaatgcttgctcaccatttgtggtacctggttttaatcctgccttagttagggtttttattgctgtgaggagacaccatggccgcatcaactcttacaaagaaacatttaattgaggtggcagcttacagtttcaggggttcagtccattaccatcaagatgggaagcatggcagcgtgcaggcagacatggagctggctacgtcttgaccagaaggcagcaggaagtcaactgactgtcatactgactgaagcttgagaaaagagacctcaaagcccgcccccatagtgacacacttcctccaacaaggtcacacctcctaatagtcccactacctttgggggccattttctttcaaaccaccatacctccccagtatcacctccaaagaacccccacacactgatttattggtttgtgtgtgtgtgtgtgtgtgtgtgtgtgtgtgtgtgagagagagagagagagagagagagagagagagagagagagagaggtgctgggggccatggctcactggtagagataagagatgaccctggggactctgttctcctcgtctatggcggttctagggatccagctaatgctttcagccttggcggcaggcatggttagtggctgagtcatttcaccagcgcgtggtttccttctttaccttcaaatttaaaatttttttgcctttaaaattctaagtgaatggatattcatttaaaagacttaactagcaagtctaatacgtgtgtgtatgcgtgtgtgtggaagagaaagagagagagagagagagagagagagagagagagagagagagagagagaggttaaaatgccatactgacccctaattccatttccttcttcagaggcaaccactgttagggagtgatacatgaattgctctcatgttctctgaattcgtacatgtctgtgcacacatgtacacatatgtggcagttttatgtgtacttcatagcacctggcagcttagtttttataggactttagttcttggtgatctcttcattgcgatatacatagcctcatggtattcttggcaattgtgccctattcggtactttgaagttgatgctccttgagttactgtggggacacacaatgatgagccaactgaaagctggggctgcatttgacacacacctagccttgggactattgtagctgactcagcaatgtactgtgtcctggaagatgtctgaggttcacttttatgatagtgagactgaccgggacctgcacttccctgttgagtgccagcagtggaagacagtgttgtaccacatgttctgaacctaggaaaagatcctggggcttttgcatcagaaagtgcaaaaatccttacccttgtaagtcaaggatagtttgtgctgtaacgtacgcttgactttcatctaagtttgtttagttagtgctgtaagataaggatccaaacatttcctgcctccaaacagctatttccccagcactggccctttcccatgtgtgggggcggggaggatttctaagttggcacagctgaccatacattttaggaataagaagagaaaaaggatataccttctccactctaagaagtaatttcccatgtgcactctcctgtcaattccaccatgtctctaggacatgggaagtgtttctttcttgtctcacatctgagtaggtgaggttgcaagtgagaggcctgcccaggctccacagctaaggtttttgccttcaccatgacaggagtttcggtggtaaaggagagctcctgcctgcccgcctcccttctaactgctcttcccttccctccccccaacaattgttttttgagctcctatgtgatggttgctgtgctagggataatgggaaagaagtctcatggccttcagaaagtgttcccttcagcttgagtctcctagtctgggtctgtgaggtctatttaagctttcagagtctgccaaaacgtcccatccttttaaccaaaaaggatgcattcccgaggaacctgctgttctgttttgagaatcccagccctcagaaagagtctgtctgtctggtgatctgccaggcttcttgtccagacaggtaagggatacatttttagagaaacactgaatagtctttctctccccctattattgtggtagattgaaaacggcaaacatttatgatcacacagtcttggtgggtcaggactcccagcatggagctgtccatctcaggctcagtatgctggcaggtgacatcggttcctgccgatgtgggtctctgcccagagcagttcacaacatggggactgactccattcacagcgagcaggagactctgtgtcaggattgccttagccttttggtattcactgggaagtgaggtcccatcacctctattgtaggaggtggggaccgctgagagtcatcattgaggcgtttagacactgtaggagctccgctcatcagctggaggtggcacaggggtaacttagaattaacaggagaggaaggggggtgtgttgatgacaaggctggtagtctgagctcaacaggattgtggttagagtgtgaagatagacttcctgagctgaggattgggagacttggatcacatggtagaatctctgactacagctggccgtccatcttaaccaattccttcccattgctgctactgtggaccatgattagagaaaaagctacagttgcttaataattgtaggttgcgtggtgcctttccttggtcttaaagtttaaacacatgtaagtaataagcacagaacagtaacaaagaatgcaatgaaaacacaaacaaatgtgaagcaaagtgtattccacacacatccatcctctcatctgttagtcacctttctcatacatgtggcagactgacagaaacattttaaaggaaagagggctggttctggctcatggcctaccctctagtggcatacttcttccccctaggctctgcctcctacaggttccctcactccctaaaacagcaccatcaactagggagcaaaggtcaaagatgttagcttgtgggggtcatttcatactttagctgtaacatcctggtgcttcactttccctcctcagccctggcctccaggaacactttcttagtatctttttggagatactgtatacttgtaagatacatatatgcttgtaagaacaacttctcatggtcttcagcacacagacagagttgggaataactattagtcgggctcctccaaatgcacagaactgaaagagtgaaagagtgaatgtatattaaaaggaggttttctgtgttgacttacacggtccagtagtcaacagtggctgctctcaccctggagaggctgtaactactcagtctgtgaggctagtccaagtccagtgctggaggcctgaaggattcctagagagagccaccggtcttcagtccatgctggaaggccaacaccaacaaagaacagcggcagcagcaagatgcaaactgaatagatgcacttgcctgcgccatgtgaaggcaaaaaggcaaaatctttgttgttgttgttctttctcaagcttccttctacccatgctgctgaaggaaggtatggtgtgcccaaggtgagtcttcccacgtcaattcaactgatgtgtccagtggcttctctgatggtcagttctagatccagtcaagttgacaacattgaacattatggccacccacagagaagataaggacccagtatgtagtaaaaacaaacaagacacatcttataattcaaggagaagaaaatgggtgacccacagagaaacttggtagggaagaaagctacatgactgctggacacctcaaggtatgcaaacactgtggtcatgcacgaatccatgcatgccgccacagtactcgggaatgggaaacagtctccagcagcatgcgacacagccctgtgagcacacggagctcttcctttgttttctttcagccattcctgcacacagcatgctcctctgtgctgccaatgctctcctctctaacaccaatgaagtctaacatcccctcaggtgtccaagagcctctaccgaacgggatgtcttcctatgccttttttaaaaaaatgcagattatctgcccttcccagagcacccaatagtaacgtgcttcagcatgttgatcagttatgagtctctacagacagaagcttctctgagctcatctgtgggctcctgtcttttcctcctcacttccaaaccatagagtgggcggtttcactccaccatacatggtcaccatgatcttctgcctcatgacaggctcagaggcaatgggaccaacctctaaaactctgaattgaaatgaaccttttcctttcctaagttcattcgttatctctggaatttgctctagtgctagcaagctgaccgaaaccaatctttaacaatattagaggggagccttatactccctgcttgatttctatcagttaggatagaaatctgtcccaccattagagagctgcagcagttcacctagtgtcaaatcacagaaggagagcagctccccttaattccagcctttttttgaggagtaagaaagctgtctccagctgggcgttggtggcgcacacctttaatcccagcacctgggaggcagagacaggcggatctctgtgagatcaaggccagcctggtctccagatcgagtgccaggacagcctccaaagctacagagagaagccctgtctcgaaaaaccaaaaaaaagaaagaaagctgtctccaacgtcagcatgcttgcttcagtaggtgtgccttctcctcagggaggctgtgcaggacaagtaaactgtggtgggaagtctccattcttatggcattcctatcaaatgtgctctctctctctctctctctctctctctctctctctctctctctctctatccctccctccctccctccctctctctctctctctctctctctctctctctctctctctcggttgatattttgagtagtgtccaattatgcctagtttaccaagagtttttgtcatgaaggtgtgttaaatttttatcagtttgttttctgcatttattaaagtagtcatttaactttcccctattttatttatttgatggattatattttttccttataacatttaattttgatgtaatttaaaatgcaaacgaagttgaggatttggggctaggagacaatccagtcagtaaagagctagctatgtaagcatgaacccctatgtttaacccctaagaaccgtgttaaaaacaaaaaacaaaacaacaaacaaacaaaagagctgggtgtggaggcgtgcatttgtaatgttcataagccccttttggaggtagaggaagcagatggatccctggggctggctggctagccatcctagcctaattagtgagcccatggtctttgacaaaaaaataaaaatataaataaaatgtaaaaaatcaagatggagcagctggagaggtggtccagtggttaagagcactggttgctcttccagaggccccatgtagcagctcacaaccttctgtaactccagtactaggaaacccatgctgctttctggcctctgtgggcaccaggcagacacgtggtacacatacatgcatgcacgcaaaacacccagacatgtgaaatacataaatgaaaattaaaaattaaagagaactgtccctgagaaatgatatctgaggtttgcgtctggccttcacatgcatgtgcccctgccaatgacagacagacatgcataaaacacacacacaattgcagagaactcatgtgaccttttacctagatttactagttgtttacattttgcttaatttgctctacctaatttacacttatacacatgcatatcacttatttgttttaaacagttagagatcattatgccctcttacccataaacatgtgtgtattttcttagaacaatgatatttttatatatgactttttaactcagtaaggctaggaaattaaacactggcgttgctatgttttgagactgtcatgtttcccacaggctcatgtatttgaacatttggtccccagacagtggcactgttttaggaggctgtgcaacctttaggaggtgagacctagctggagaaagtgggcttctgggggacaggccctcagggttagagcagggacctgtttctgcccagggtgtttgctttgctttggatccaccgagatgtgaacagacagccctgggctcccaccactccaaagctgtccctcccagacatgggtatactgcatccccttagacagccagctaaaactcttctcccttcaggcttttctctcaggtattgcttccaaaacagtgagaaaaggaattggtatgaatgccttacagttcacatatgcaaatgataggccactcttgtattctcagaataaactcccttttgacatattttatccttattgtattgttctggatttagatttgtttggcctccctccctccctccctccctccccctcctgcctccctccctccctccttcttgctccctctttctccgtcccctctccagccactccctctttctttgtaaatctgtgtttataagaaagtttggcctatccataacttccttttgggtaatgaccttgctcagccttgaagggtgaatgggtagtgtttgatctcttttccatttcctggaagaactgtgtaagattctactatgtattctctaaataatataaagaactcacctctgaagggatgggaagggctttgggatactgtgagactggacttattttctttttatctagtgtctcttttgtaaataatgcctggaaaaatggtcatttaacccaactttcctatttattataaaaaacttgctcaacataataccatccaatgatctttttactatatagaatgaatcatgcccccttttgttcctcattttttgggtatatttttcaggaataatcttaatatttaatttccttagaattttcaagtaactccagtgagttacactcttgctttatattttattaatgtatatttttatatttttcactttcttcattttattgcttaatttgcccttggccttgctactggagacacatgcttacaatatcagaattttggtctttctattttcttatatatccatgtaagattatgaatttttctttgggtacatctctagcagccttttttttttttgcagattttttttatttgaattagaaacaagattgttttgcaagtcaatcccagttccctctccctccctcctcccctaccactccccaactaaaaccctgcctatcacatatcctttctgcttcccctggatggtgaagccttccatagggtgtcatcagagtctatcatatcctttgggatagagcctaggcacacccccatgtgtcttggctcagggagtattcctctaagtggaatgggatcccaaagtccacacttattctacaggaggttccatagatttccgaggttttctcactgaaatccatgttcctggggtctggatcagtcccatgctggtttcccagctatcagtctggggagcaagagttccctgatgttcaggtcagctgtttctgtgggtttcaccagtctggtctggacccctttgctcttcactcgtccttctctgcatctggattccagttcagttcagtgattagttgtgggtgtctgcttctacttccaccagctgctggatgagggctattgggtggcatatgagtcagtcatcaatctcatttaaggtagcctctcctctgttgcttagattgttagttggtgtcatctttgtagctctccagacatttccctagcgtctgatttctctgtaaacctaaaatgtctccctctattatggtatctccattcttgttatcttctattcttcccctgactcaacctttctgctccctcatgtcctctgcatccctcctcttctccccttctcattctcctagctccctcccccctcttcccgtgctcctaatttgcttaggagatcttgtccctttccccttctctaggggaccatgtatgtctctcctagggtcctcctagtttactagcttctctggcagtgtggattgtaggctggtaatcctttatgtctaaaatccacatattagtgagtacataccatgtttgtctttttgtgattgggttacctcactcagaatggtttcttctagatccatccattttcctgcaaatttcaagattccattgtttttttctgctgagtagtactccattgtgtaaatgtaccacattttctctatccattcttcacttgaggggcatctaggctgcttccagtttctggctattacaaatagtgctctagcagcctttcttaagttttgaaatgctgtgttcataacttcaaaacacttttaacttttattgggattttcaactcttttaaaacctttttattggaaattttcatacaatatattttgaatatattcttttccctcctctaacttccccctaacttcaagtttttctctgtctctctaaaacaacaaatcttgacaatcaaaacaaacaaacaaaagaaagccaataagacaaaaaaagtaatactaaaacaaaacaaaacaaaagcacatagaaaactcggagcccctgttgtgatggcctgctacccctgagcatgacgtctgtcctggaatgtggttgttatgccctcatcactccttgggagaaaagcgattttcttcttcctagcaggggccagtgtgtccagtcctcttttcagtagtggggttttgtctggttggaacctgtgcaggtctttcacatgtcgtcatgctctctgtgagttcatatatgtatccatcatgtgtctggaagttgctgcttctttggtgtcgtccaccatctctggctcttacaactggagtcttggctcctcaactctcaaacagtgtagcagactaggatataactttaaatatttagggcaatagttttattggtttttcaagacaaggtttctctctgtagccctagctgtcctggaagacctggtcactctgtagaccaggctggcctcaaactcatagagatctgcctctctctgcttcggagtgctcggatcaaaggtgtgcaccaccaccgcctggctagttttagtttttatgtgattgatttctagtttaattttattgtagttagaaaatacactgtataggattcccatagtttcaaaaattttaaggactcgcttaatggtgaatagtggtaaaggcaataggtgtagggagacagaatacacagtcctttagttcttggatgcagtatgctaaatacgttaactagcacatttgttggttgtattgttcaactcttacattctcatcattttttgtcttgttaaccagctcctagttacggagatattatggtttctatgatttggggtttgttttccttgcatatatcaaatttggctatctgtatttggttttgtaatctgccacacaaattcactaatgtccctttgccctgataattgaaacttatttatggatgagaagatcccgacctgattgcttttaatttcttgtaatatttaatcagatttcagattgtaatgtgttgctttcgcctcgcccctatcccagcccactggactccgattgggaagttcccttcccgggagtcttccctctgtgccattttggctcagctggcttggaagtcttcaaatatccatccatcatgctcaccaccagctttttcgtttttggttttgttgtttctgtttttgctatattataaacaacagtaactttaccttttatataaaaaattttgggctttttatatttttagctcttcatagttgatattctaacaattcccatatgctcactttccccatgaaaatatatatacatatatacatacatatatatatatatgtatgtatatatgtatatatacatatatatgtcacatgcaacatagggtcacatgcaagctaggcaagtgcagtacctgagttaccttcagcccagcaaccttcattttgtttgtcttccaacaccctcatatcactcccattgttaaagggtggctcagctcagtgtgtcatcctagcctgatggttattttttcttggcattttgtagccagtagtttctgcctgtgcctattttggggcgaatataaaacatgctaagcacccaactgctgtttccttgtatgtaagtttccatttctttcttgtaccttgcagtattttctctttgtgtagtttcagagttttactatgatgaatctaaatggagacttagaagagagaggcgaatgactttatgattccatgctgtcttcagctatggagactttgagtgcataaccacacaaagattactctctgccattccccaaatgttcgttcactttactaaaattctgtgaaaaaagtctatgaatttctttatgtaggcattgtatcttttaagtgctgtatggaagaagaactttaacattatatatgtgcatgtatataggtatatgtgttttaagtttaaatttgcttttaaatgatcattgtctgttaagacattatttttaactatgtgtatctttgtatggatatgtgcttgtaagtgcaggtacccttagaggctaaggatatcagattccctggagttagagacagttgtgagtcacctgagccagacgcgggtcctctgcatgagaaatacatgctcctaactgctgagccatctctacagccccttaaatgtactttaaaattctatataacaacacaagttatacttaattgtgggatactttgtgatgtttaatggatgcaatgtttaaatctcgttaatcatttattccccgaactatttataatttctctatggtgaaaaacttcaaaatagctgcttttaaattaaaaaattacattatttattttgtggtcatgtgtgtatttggggtcggtgtcatgcatgtgtgggggccagaggacaactttcaggaatggattctgtcttaccatgtgggtcctggggattgagttcagtttatcaggcttgacagcaagagtatttatttgctgagccatttttctgaaatatacacaccatattcttgttatctatagtcacttcattgcacacaatgtgtgcatgtacagattttgagtgttttgtccgaggccatgctcaggagaattcttcagcactcccatttaattagcatactgtttctctgtatccaatctggactggactcatagacagacttttaaaaacgactctatttttatattttaagctttctagatgattccttttatgttcatcttctcttccattgttttcctctgcacatggcttttgcccattaaaatgaaagttattgtttaacttatgacatcatcactttaaacattggcttaatcagaaatcaattggcactcagattattgatctcatcatcattaaagcttttcttgtttggaaatgttttctatgctctcttcacctcgcttccttcttggtattttctctctctttactgatgatttcacagttgtgtagaacggatgataactgtctctaatgatgacccacttctgctatttcagggctgtcttcctctactggtcaggttcttcagaaaaacacaggacaacctatagatttacaaaggcgactggcccttgctattatgggagacaagaagccccgtgattagacatccatgatccgaaagagcgaaactgttgttgagctctggtatctaaggagaccgacactgtggctcagacagagggagtgtccagtcattctctgatcacgttttgttctctttgggtcctcagtagactagctgctgcccacacacacagatgagggtcagctccttcactttcttcttctggttgctaattctctacagaaacacccttccagacacactcagaaatgttttaccagctccccatgtatctcttaccttggtcaagtgacacggagaattaaccatcacatgccctaacaatcctggagctgtcttatccactgagtttggtttagttttattgccacaaaggcttccccttgtcttctgtctccctaggctgtgaagggaagaccaggagacagactgaaaacagattacggttcagatttcttccctgaggaacattcattccagtcgctttctctaccaatgagagactccaactcctctcccttggaatatgactgattgccccattccacaggagtcaaactctagaacattcccacctgaagacctgtgactcctgttgctaccagattctatcctattaattaattaatcaattaattaagctgggaattgaacttggggccttacatgtgctaggcaaacactctaccacagaggcatactcccaccctcctcctaattatcccaagcccagccatgtggcttgtgtttggatttctactcatcattgctgtgtgcagcaaggactcaagagacaaagcaggaacacactggtttgcccaggaccctctcccaatctgatggttctcttccttctagtaagtgcacacacttttatttcagagagctctaagtgtagccttgatgctggcctaagactgtcactttcatcttccaaagagaatctctgcatctaccatggagacttctgccctggaaaggagcaggagtgtgggaggagacgtcagctgcaaagacatcgtctacattgtaaggaggcgctgggacagatgaggccagaggtgggcagctattacagttcggatttgaaatatcctagaacgctcacatgttgaaggttggttcagttgtctgtgcaactaggaggtgggaacctagatagaagaaggaagtcatggaggggaggaggagggaactgggattgacatgtaaaacaatcttgtttctaataaataaaaatatggagacaaaacaataaaaacaactgatatgaaaaaaagaagtcagtcattggggtcatgctgtgtggggctttggggacctggtcctttcttctctttctttgcttcctgccaccatgaagtgagcagtgcttatcatgtgtcctgccatgatgtacggtgctgccacaggcccaaaagctacagagccaagcaaccacagacagaaactctgaacccaaatggatctttcctcctttcaattgtctcagggattttataatagtgatggaaagctagcatgggaacttgttctcgactcttccttttcatcaaatttcccaaaggaaaacaaagttttaacttccaggaatatagatctggaaatgttggaagaacaagaaaatagacgcctaaattgtgtcaaaattgtttacaaaattgtttatgacaataaaacaataccaaacatccccaaatgtacagaagctttacataaagacaataaacatttttatgtaattgattatgagaaaaaatcaaaactaaaaattttactgtgttattatttgttttaaataagttttctgtaaggagaatttgaagataattcatatatttgaacaatctaatcttgaatattaactagttctgatatttctgtgtatatatgtccatgaagtatatgtgtaacacaaaaaataaaagacccagggactgatattgggctttaagctgaagatcagagaagcaaagcagccaagcctgtagatcctctacccagctgaaatggtaatcctgtctccaggagctctcaagaagcctcagaggcaaaaggctctcagttcctgtctcctcctccttatattcctttctctacccagccatatcactcctgtctccacctccctagtgctgggattaaaggcatgtgatcccaggtgctaagatcaccattgtgtgagctctttcttttaggactggatcaatttcctgtagtcagcatggccttgaactaacagagatctgtctactttttaatcctgaatcctgggattaaaggtgtgtaccaccaccacctagcttctatagctaactagtgtggcggctttgttattttgatctctagtggctttactaaatcataaacagtatatcaccacatatatgtgtatgtgtccatgtgtttttgggttcagggacctgcagaggccaggagatattggcgtcttgctctatcattcatggtaaatctgaaatattcagtttgggctaggctgtctggtcagtgaactcacagggtccactgtctctgtcctggagtgctggggttatagtcacacgtagccatgctgttattttgcgtgtgtgtgtgtgtgtgtgtgtgtgtgtgtgtgtgtgtgtgtgtgtgtgtgtgtttggggggaggcaggcagagattgggccacatgtccttgtgcttgcatgataagcactctacccctggttctgagttctaaagagaagattcccactaagtttgcactgtaaccgaatatgcacatggtgtaaaactgctaagaaatgatctagaggttgtccccgccccccatgacaaagctgaacatctcagctctttcagtgtgaactttctctttatagcctgttaaaaacacaactgtggaggcaagcttcgccctgtatgcatgcagatgtcgttctcaggggttgaaacctcagtttctctgaattctgtgagcatgtggtggccagccctgagccatgttaatttcccagaagatttcaaagaattatcttttgaaaaggagaagtttgagttaatgaaaaccaggataacctcgggcagtctcatggaaaagaatagaaacaaattactgctggcttgttcgacattgttgctgggggctttttctagccaaagcagccggctttgttttcttgattccaaaaagggaagtcacttcagtgatgtcctgggagaggtaagacagccaagtcatgccaagtgctcatctgggttcctgtttaatgattttggtgtgtgtgtgtgtgtgtgtgtgtgtgtgtgtgtgtgtgtgtgtgtgtgtgtttgggtgtatgagtgtgggtgcctgtggaggccagaggcatcagatcccccgaagaggcagttgtaatggttgtaagctgcttcacctgggtggatgctgggaactgaactctgtcctctgcaagagcagtgcacacttttaagtgtcaagttatttctccagccccatccactgtctttcttaggctcagctctttgagggaagtattgtgaagaccataggaacttgacatcagcagaccctgggtctgaattcctgctgaggtagtttgaatgagatgtccccttggtcccagacatttgaatacttagtgcctagttggtggcattgtggttaggataggaggtgagaccctgctggaggaagcacgtcactggatgttggctttgaggaatcaaaagctgtgagctatccccagttcactctctctgcttcctgctttcggtttaagatgtgagctttcagttgctcacgcctgctgccgggctttgctttcatgatggtgatggactcattcttctgaacccgaaagcccaaacgctcccttggtcatggtattctagcacaccaatagaaaagtaagtaatccatccagtctgttacaagggaagctttgggaatttggctcccctgattccgagcttcaatttttgtaacaattaaacaggtaactaatgttccctctcacgacttggtgatggagctttggattatggaaggtctgtgatgcacctggtacatagtaaatactgagaattttatactgagcaaatcagctcttcactctcaggcagtcattcaaagacactgacctttgttgttgttggaaaggcattagggctggaacccagggctaagcacatctgatctctgagctgtgcctctaaccccacttcgcagtatttttatacatagtttcttgcaagtggtggccagatgactcacacagatttttgtgtatgaattctaaggaaaacatcaggtatctattagctgtgaaacgagttacgttcagaacagcttcaaacaaccgttttatggagcccccagagtctgaaaaaaaaaaagatctctgaggtccattgccttattgagtagcatctgagagctaggggctcaccaactcactaactggagttaaagagttacccacaaaattttttccttgcccttctagctgttggccgggacttcacactaaggacacctaaacatggtatctccttgtgacttggggtcctcaccatatggcagtcctgtgatttttatacacaacaaacaatgacctgaagggaagtttcccaagagaaccagaaaaaaaatgtcctgactttgaaagaagccacataatgtcatttatggtcctcaatccccaagagttccaggggaggaaacatagaccggatctgctgttgagaatgcccaagtcgtgctgtgaaacatgaggaattggagagatcggcccagcatctttagaaaatacaaccttccccacaggtgagtcaaaagtcctcaaaataggccggaatgctggctcacgcctttaatccctgcactcaggaggcaggtggatctctgtgagttggataccagcttggtctacatagtgagttcctggacaaccaggactatgctgagagatcctgtctcaaaacaaaacaaagtcctcaaaatctttgactgggtttggtgggcatgtggcaatttgagaaaggccaccaggtgctgctgcagtgagatgaggaagaccgaccaaggcagaactagagggaatggagaggaggggcaaggagtagacttcatttctcacacaggcaaggaggagggatcgagggtgaagacccaaatggttctgagggtttaagtttgagtgtcagaagggtggaactgccatgatctgaaacagggaagtcacaaagcaaagaaaaaaccacctgtttcctcttcactgatcatgctcgggccccctttctagcgacttacgcgtatacactctgtctattttgcatgtgtgtggttttgatttcacagatctgtatggaggccccaggaagtccctaagggactgactgaggtgatgactccctgagagatgacatcaatggtcgtcatttgatgagtctcacattggagtccaaatcctgtattaatggcaggctttccctacattgcaggaaggaaagggcggacaggtgcagctgggcaaaaggttgtcacaccatcttgaaaacatgtgatccaaatatttttatcacaatttttatttaaaataaaaacaatcttattttacacaccaatcccagttccttctccctcctgtcctcccatgcttcctcatcaactccactccccaaggagggtgttttggggcaggacctaggccctcccccatgtgtctatgccaagagagtatccctctatgtggaatgggctcccaatgtccattcatacactagggataaatactgtcccactactaaaggccccatagactgcccaggtcttctaactgacacccatggtcagggggcctggttctgtcctattctggttccccagctgtcagactggggtccgtgccctcctactttctcaggtcagctgtttctgtgggtttttccagcctggtcttgacccctttgctcatcattcctccctctctacaactggatttcaggagttcagctcagtgtttagctgtgatgatctaaatatttcctggaagatgatcttgggctccttttccatgcttggaggtgaggctcccaggtctctgtccttgacttcacctttgcacaggcatggtttcttcacacagcttcactttcactccccagagtttctctcacagagaggtttccatgtagttagcaggttattttaaacccttctcagtgagtgctaccctcttcttagtgggatcctcaaagagactcgaagcatgcattcccgtgaaactgtcgttgctttaatatttaaggaactagcttttgggaattgctgttagaagggtcaaggatgcggctcagctggaaaagtggttgcccagcaggtacaaagccccaggctggatccccagcaccacacagatggagtgtgcagtgcatacttgcaatcctagcaccccagaggtggaaacaggaggatcagaagtttaatgttgagctcagctccatagccagcctgggttacctgaaaccctgcctcatggtcccccatcctcacccatggaatctctgtttgtgtcctttgggaaacgtcatcactgtatacaccatgtacataggggatcttttatttgtcagccacagagacgaacccaattaaaatggaaatgcatattcctggtatgtacgccaagctccgatgtctggtgtcagacacggtgtcaacgtgtctctgcttctttcaattcttcttgtagagtcacgaaattatttagagctcacaatgctcagatttgggcatccagcatgttagtaagaatgggctgctccattttatgaattcttttcaggtcgcatggctctcactggaactggtcttgccctgtgtacaaccatgctgaattcaggagacttgagtttgtgattctttaggaaagtcaccttactttctttcatgttctaagaactaagcccatgctcacacgggcacgcatcaggttcctggcttggccttatttttcctttattccttagccacagttcttcaaacccccatctattgaaggcagggagattatacccaaggggtgattaaaatcctggttttatatgatttctgcctctgcccttagctacctacttggccaccctgggaagcagcatccacggtgcctcccctgcccccacccccatccgtcagttcactgcagtcttgtcctggacaattccccaactacttgaaagccgaagaatctgagtctggacctgagtttctgggcttttttctagaaccagaacccaagtgctccggtctcatggacacactcgcaggatagtctaaactctcatctcaggagctctgtggctttgggagtgatgttagtttgagtcaccagaattcctgaagggctgggaagatctatgctccaaatgtttgtttacacatttcctcattgatattgttttctgaacacatctgggcctttcttcatcactgggttacccaaacagggcttctcctttcaggcaaaccaaccggtggaccacaggctgcgtgtggccaaggttagagtctaatcagctcaacacaggatcataaacttacttaaaatattaggagcttttctttcttttttttaaaattcaattttctttttcagtaacaaattgtatgattcttgagaaaaacctttttgataacaatgtcatgttgaaatatcgaaaggtttgacatgcctgctgggcagtctacacaccagcatacctgcttcttgtatctgtttaataacgtgaaccaaaatactccgccattatttttcatactttgcctggaccagggcaacttcttgcttgacctggcctgaacccctatatatgtccagtctccctcttgatgacaaattccggtggcaagctttgtaaaaggcagggagcaatctgaacttctgtctcctggaatctcctgagaagctgtcactcactgggtgaccttaggcaggacagttatccactcttcatctgtgcctaggggagattgttactcaactcatagcacaagcaacccaacaacctggctcagtacctgatgtgtacataattcctccttcactctctgtgttccctagatgcttacttaaaacagtttcctgaatgaatgcatggacagatagatacacacatggggtggtttccttctattccaacctgtgttcagccgcagcactgtttgtcttcattaattgatgactttactgttatgtcaaagacaacaggagtgtggactgtaacccccccccccccgatattgctagggcttcaggcagggtcagagtaactcaacctatatgaatgccgacttttattctgtggagccttccataacctgttggaagaaaagcaaggtggctccatgtctcatcttttatttctctgattgccagtgatgggaagcacttgggacaaaaagtgggaatatttgcgctgaaccacttgaatggcattgaattattgtgagacaccagacatggttctgagcatggctaaatatgaaggcaaacgtgaccaaattcctgaggcttcccagactgagacatctcacagatggaagcaggtccactgcgtgagaatgagagcagctcccaggggagcctggaaagtgctcccacgactctctgcccagcccaagctgttttccgtcctagtcagcagccacctcacctcttttctctaagtcttacctatggccaggctcctgagttcacttaactcactggggacctttggagtatgacgttttgcccagccagtcactttgaagcattctatggtgtaggaatgagtgctcactcattgcctttggacagagccctagcctgaaatgaatatgacagcaagtgtgtgggtcctcagaggggaaaaggcctttttccagtagagctgacctggctctgagcttctctaaaacagccctgagaactcagtgagctcagagaaccttcatcactggcttttgtggaatgattgacaatggctaagccttatgtgcctgttctttgtgggtagtattgcctgcttaaagtgactgtttcttaaaccctgcatcccagtctcctgtaagccagcactggggaatccagcaatgataagaagtattagttaagaactgaaaatggtctttgaactctgcacagcagacatgattccaagggatgaggcacagccacctgaccaaggatctagaactttcctgttccagagccagatcttggttacacctttcttatctaagaagcccacagaagtgttcgttcctaatacaagggagtagagagtgactgaaaaatttgtgtctcaaggtaagctaacgcaaaataagagatactgcctttcccctagcttgtacccatcaaaattagatgtaggtaggtaacaggtagacaggcagattgattaatagagacagatggtagaggtgtacatgagaaataaagatgtttgataaatatgatagagatagatgatatagatgatagacaaatggtacagatatatgatagacacatatatagggcctagagatggaaatccattgatataaagaaagatagacatttaatagacaaatacagatgatagagacaatagatcaattgatatagatgatagagatggttgatagacccaggtggtagacacagatgtagatgatagggacatatgataaacatacggaaggtagacagaactgtagcccagcggggctccaatagtgggcttgtactggcttcatccctgtcatctctggcagtgacacagatattaagaaacctgactcagaaccactcctgcagagtgaagacagcacctgcatgaaggagttaggcatctcaggcttgcaggatggccacagctcagcactgtgcctgaccctattctccaggggtttaccccacagcaaatctatcagccaaaacctacaagtgtctggggttggagtgatgattcaggggtaagagcacttgctgttcttgcagaggaccagagtttggtttccagaacaaataattggctgctcttgattatcattccagcttcaggatccgatgacctcttctggcctccaagggcacccacaccattcagcatacacacacacacacacacacacacacacacacacacacacacactctcactcactcacacacgcgcacacacataccacaacacagacagacagacagacagacataacttaaaagcaacggaaacctagcatcattgtatgtgaaggagagtaattggtaccctgtagggtaaaaaaaaatccataatcactcttttctggggagcagtgtgaactcagaccgccgactggatgaggcagtttgatgtaatattaactcccaggtagaaactctgactgtgctaagtagctgagtgatcttctgcacattaaatttctatgagtctcagtttctaccacaggtgccagtcatggttacatcttcaaccgcacagggctgtggagaggaccaagcgaggtgatacatgcatttagaatgtgactgcatccagaagacgctcctcagatgttagtggcggtcatcatcacccggtaagggctatggatgtcaggtgacatagacctacatgggacatgcttgtgaaggacagtttgtggctggttggagagaggcagagtagttctttcctgtcaaggagctggcaggctgggctcttcttggagttattttgttgtgaaaatacccaacatacaaagccagagaaaaaagcgtaacggacatgtgtcaacccactaggtggatatatcagttgttaacattttataatattttatttgttgtaaagggtttgttcatatactttaaagtaacttacaaatatgtttcagtcctgagtgcatctttgatacatcaacacagtttcttccagaatcaccaggtcatcatctcacctaactgatgagaactctgcagccaaacacacaggcatcttggaatttttttactttcacattttattttatgtctatgagtgttttgccagcacatatgggtgagtgccatgtccatgcctgatgccttcagtcatcagaagaagacgtccgatcccctggaactagagccatggatggttcgttgtgagccaccacgtgggcgctgggaaccaaagtcaggtcctctccaagagcaacaggtgctcataaccaccgagcactctctttagcccctatataggagtattttgaatcacctttttttttttttaccacctatttatttgaatccagacatatcatgctggggaccattctttagacataaggcaccacgtgcaggagagttgtcccagatggtaagacagagaggagactgtatgggtgggcagaaatccttagtgtatgttcactctctgtacacttttggagtggcagagtctggcctgagagccttagcatggatgagctcattacaatttgcttctttcaaaaggaggaaaacatgtttttgaaggctgcttgacagacaaggaggatattaataaatgacatgcaaatttcttaatttcgctttggctggctatgtgattgctacttctgcagtgcaggctgctaatggaagttcttctgagctgtgagtcggtattaggctgtctggctgaactcagctaataaccagagggcagggctgttctaactcaaagcggcaagacgaggacacatctgatggaaattggcctggcatgagaagttgagagcttaattctgaagctggttcttgggcggctattctgcaaagccttgcccaagaggctgcttgaagttctttttatagcgcgtggctcacacatgagaaatggtttcatcgattattggcctcctgacacttcactttgccatgttgttggtttttctgtttctcccttcggctctatacaggggtgtgggggggtggcatctgtgtcccatcatgcaggcttgtgtgctctgggcttctcgtttatatcaccctttcctcgttctccccggatcatgtgtgaggcccttcctcatcgtttcacaggatgtttagggtccgcttttgtctcactgttgccttggttgttctctggtgagaacccagccgtgtaagacggtagttaaggatataggtattgggatgagtgtccgtccaccactcactactgcctccccttttctcaatggcatggtgaaccctgtccttcaaatagccatttctgtgtaaggctgtccttcactgtaaccaaattcctgaggcaatcaagttctaagaaggagggtttgacttcacagtttcagagcatggtcatgtagtgctgttgtctttggggcagtggagaggcagtgtgggagcctgggtcacttcatggtaacagagaagcaaaaagagagagggagaggaaggaccagggtcccactaccagcttcaaatgcatatctccaacaacttagcttccttccacttctggaaaattccactgcctcccagttatgccaatctggtaactaagctgtcagttagcgggccttggccagatattaaattgtagactacgctgtcattctcttgcatttattcttttgagaagacttttttttttcttggaaaagattgtcctccccaagcatgaatgaatggagaatgtgtgtactgaagaaaaatagcaaccataaactggagccttgtggtaatgcaagatgcccattgtgtcctgtcaggcgtaacggagctcagctctctcctcctcctcttggaatacacggggtttgggattgtgtgtgtgtgaattgcaagtgggctgtacttatgcagaataaaacaaacatcatactctctcaggtccgagatgtaaaagcaactgatcccccatagcatcacggatgctctgcccctgccctcatagcaaccttcacacttcttattgttgaaaaagaaatgggctctatttctctcagccattctagctccatttcctgtgacttgtggatgagagaatgcttgaattgttttgttagcttagtttatatttgtttggtagtatgtgtatatgtgtgtgtgtgtgtgtgtgtgtgtgtgtatgtatgtatgtgcatgcgtgtgtatggttgggttgtcaggcttaacgcatgtgactttctgtggagccacattagccctgaagacatcattcattatattatatatattatatatatatatataatatatatatatttaattcaagttagggaacaggcttgtttcacatgtaagtcccttctccctctccctcccctcaccccatccctcttcccccacctccaacctaccccccaccccatccacccaccacttcccaggcagggtagggccctcaacaggggctctgcaaagtccaccaaatcttcctgtgctgggcctaggccctttctcatgtgtccagagccagagtgtatcccttcatgtgggatgggctctcaaagtctcttcttacaccaggggaaaatgctaatccacttccagaggctccctggagtgcagaggcctccttattgacatccatgttcaggggtctggatcagtcttgtactggcctcccagatagcgtctggggtcgatatgctttcccttgttcaggccatctgtttctgtgggtttctccaacctggttcagatcccttcgatcttcattcctccctctcttcagctaggttccagatttcagttcagtgtatttctgtggatgtctgcctctgcttccatcagccactggatgagggctctcgtgatcagtctgccgaagacattcattcttaactaatgctgaccaaaaggaatgcccttccagaaaccatgagccaaactcagttggcaatttattagcatcttccaaagcaatatacttgcagcctgaaactacagtttagatttttttcctgctgtcttccatgtttctttctgcaagaccaagcaatttcagacactgttgtaccctgcaagtgtagaagtgtaacttagggccttccatggctgcatctctcctcagtgttctctctctccttctcccttccctctctctctgtcaaaagcagtttttattttctttgtcttcttgagacaaggtcttactgaattgcccacactggccttgaactcttggctcaatccagcctcccacttcatccttctgagcagctggagctataggcatttgcctggcatagtccttttgtgttgaccattcaaaaaccagcacccagaggggtgttatatatgtttggtttatacagcatgactttgaccccaagtcagatagaaggaaagcacaaggaacagcatcagatgtcctcaggagtgtcccatttatttattcccaatatttatttagcaaatataaattgaccagatttgttataactgtctcctcagagggttaagcaattccagaggaagtttgcttgtcctggggcatgcagcaactctctaaactgaatcccaacacaatattatttgtgtcaaagtccacgaagctttgtctgggtcattcctcattatgatggggccaaaccagtccatttcagcctaaataggttcaccaggccagacataaggtgagagctagaagggctaggacacatctttgggaagagctcttgcctggtatgtgaaaggccctacatttgaacccccgcactacaattcaaaaaccaaaaccaaaaccaaaaccaaattgtggaaggccagagtacaagactccagaagaaagggagtgggtgtgtgtgtgtgtgtgtgtgtgtgtgtgtgtgtgtgtgcgtgtgcgtgtgcgtgtgcgtgtgcgtgtgcgtgtgcgtgtgcgtgtgcgtgtgcgtgtgtgtgtgtgtgtgtgtgtgtgtgcattcatgtatgtatggatacatgtatgtgggcaagtgcatgtacaggtgtatgtatcagacttctgagtgctggcattacaagatggccaccacatctacccagcatttatatgatgttgtggtttgaatgaccgccccccccagtcatgtgtttcaatgcttggtccccattgagcagaactattggagaaggattaggaggtaaggacttgttggaggtgtatcagtgggagtgggctttgagatttcaaaagcccacacaaggcccagtctctctctctctctccctgctgcctgtggataggatgtaaagttctcagctactgctccagctccatgcctgtgttctcgccatgatgatcatgtgttagtgttcaggcatctgcactggcctgtccttggggttctgacaggattcgccctcagctgcagccactaagagcaccacctgtgcacattcactaccttcccttttaaaggggccctgcccacctcccatctttctctttctctctctgcttctctgcttgtctctctgtctctccttctcttccctctgcctctctcttctcttctattgatcctgtctccagaggcaagtctcaccccttcccccctttcccattccctttcccataataaaacacccctccacttgagctctgttgaatggcatcttaccgtctccctggctttttaaaattacaacatggtggcctaatcctctaacagtgtaaggaagctcccacttaaatgtcttcttttataagagtttccatggtcatggtgtctcttcacagcaatagaacagtgactaagacatatgggttctggggattctaactttatcccttacacttgttcagcaagtgcttcctccactgagccacacccacgctcctggaatggacttcttcataagactacctgtttctagatcagcccatcttgaaaaacattgacgaatttgaaatggggtcattttatctttacctgattaacattcccaactttaaggagtcgggcatcctttgccagaactttctgcaactggaagaggaaactgatggagattctaagagttcccagaatcctggtttggactcacagtcaccaaaatccaatagctaggtgtgagggttgccacagtcggagcctacagcgtctccccaaagcatgcattctgtctgatgataaataaccaagacactttcaaatgacagtagtggagcactactaaatgaagtgcatgctattttatagacacacacaaggtgtccgggaaatccttcttttgggagggttgactcaaacactcaggggcacagctcaggctgaggtctgagagcagtgcatgggtgagtcatgctttccagatgttgagctcggcacagatgtcagtcttaggaagtggctcccccaggaaggagccctgtgcagtttaccttctccttccccctccaatatggaagagaatatggataaagggaaacacatctactcagcattccacagatggcatgagaaggagcatcagggtgccctctttgaagagtaattcattaattttgtttcattttttattatttgaatgtgtgtgtgtgtgtgtgtgtgtgtgtgtgtgtgtgttatagaagacagaaggggatatcagagcctctggagctggaattacaggtgactgtgagctgactgacaggctgagaacagaactcaggccctctgcaagagcagtgcatgctctaaaccaccagggcatctctctagtgcactcaggaaacttcttgatacccaagtgcagtgtgtgcagggacccgcttttccgtaaaagagggtcctatttgtctatgtgctttcacggtatgtaggacaattaaaatatgttcagattagtttgatttaaattgatgcaaatggattgagattttcagatacccacttacagcaagcaacattacacattatggtgaacacacaaagcccttcccatttgttaaggtgggtaaattctctctctccctctcattccccgaacctgtatatgctaagtcaatgatggcctccaaggctgtatgtaggtttatgctacatcctacaggtcagagggaaactgggccattgaaaaggttctgggtctttctggctctgagcctggacagattagagcatcaattccacaccttagtagcctgaccactgccgtcatctcttgtgagccaagccgacggtggtgagaggagagccccgctgaccagctcagtaagaggagagcagagcccatctgctgatgttgatggggctggatgtgacatgagcctgctggggtggatatgggccaagagtggccaacagcaggtggccccgcacatggtgtggtgagtccaagtgagtgatgtggggaggacaggcaagcagaagatgcccggcatggacaccctggctacagctgctgccccatagctggtctggacacacctgcccagcctaagggcacaggctgctgtgaggggaaacctttgttctgagaatgactttacaatgtggttccataaacactggcaggacgttagatggggacagagtcccacaccctttcctttgtgtgctctgctgggggaagggaggcaggctgcctccagactctgtccagacactcagagcctgcttggctttgcttctcttcctttcccttctctttcactgtcttccgtgtgtgtgtgtgtgtgtgtgtgtgtgtgtgtgtgtgtgtgtgtgtgtgtgtgtgtgaaatgcaggcacgcatgtgccacagcacacatgcggtggtcagaggacaacctcaggttgttagagacagggttcattatttgctgcttcctcaaggctagttggtctgtgaacttcgtctcctgtctccacccaggagtgctggaattctactcatgtattgctatatccagctttacctgggtcatggcgatctgaaagcaggcctttatcttgtgcagcaaatgctttaaaccatttctcctgaccagaccctggattttgaataagccagaacatggccacagttctgaagtctgaggtggccccagctggcttaacccctctgtaaaatggcatacatactctaaggattaggaaccactctacagcaagtgcctagcagagtgcctgggtcagtgtaagtactcattaggtggcagttactaaccaaatggcctttctgcttcagtggagaatagcattatctccagctggcctgtattgtgtataaacacacacacacacacacacacacacacacacacacgcacacacacgaggctcaccctccaaaggctcccaggtctgagcactgctcagtaataacccttgaagccttgacacacatctgtctgctccgcaaagccttccttcttccctgttacaggttgttcccgcatctaacagtccatcctccctttctgttctctgtgcaggtcttggctccccacttgcctttacttattaatttatttttttaaatgaaatcttgctaggttatgcaggctggcctcaaacttctggactcaagcaatttttctacctcagcttctagaggagctgggcttttgatgatgaggggaggagtttgcaactggctcccactagacttaaactatgcattggctatgagagagtttgtggatctctcttggaatccagcatggtggcctgagttttggaccagcaccacattaggggcctaatgcctcagggtttgaattcagatggaaatgagattatttttttttatttattctttattttagtttattttttcaagacagggtttcagtctatattccagcccagacttgaactcactatgtaacctaggttgtgttcgaactcatttcttcctcagcctcccaagtgttgggatcacaggcataccatcaccaaggctggctcaaaaatgaacttaaattccaactcagctcctacttgcctaagcgatgggtgtcatgtgccttggccagcttggctctctgctttctgggcagttacgtggatggcataacagcatgagagggtcttaggagattaggttggtagcatttgaaaacatttgtaaagcctgtggtcaccaattcatgagtattaggtactattagctttactaatagtttcttaaagatcaatgcagtgaatacgacgatagccagtttagagctcaggttcttccatgatgaaaacttcccctggtcactgtgcccacaagcctggccatatctcaggctcattcttctcattatggcagggagagagagggcagggaaggcaactctggtgacacagggggacaagtccctgtgactcacagggatttaccgctgtgcccaaatctcccactgttgcctggggcaagttctgctttccaaggccattgactggatactgtctggggcactctggggaaaggatattagatttacatacaagttagaaacagaatcactgttaggctgaggaggaaccctgaacagtttcactgtctttctgataacattagtttctctttctttttaaaattatgtgtgattaaataaaaaaaagggaacttactttgttccttctcttctcttgtgcctatttgtcccctgccatccaataaacacaacctctgtgctctgagatctggtaactgtaaactcctacgatgcagccttaaggtagttttctttgctttctcagcatggaacctatagccttatgcatgctagacaagcccttgacccaatgagtcacacactccagcccttgctcctgggatcttgaactagcctggaggtctcccactctttctggttattctgctccagtcagcctgacttcctggaagtgtcatgagcctgctggagcagacatggaccaagagagcccaacagctggtagctccccgtgtgtctgtccttctggcgtcatttcagtctacgtgatgatccttagccaacctggccttgtgtttcctccctctccacagcctgtcttccatcaaagctctaggttcaggtttgaaagttacagggaactgacaggaaaactggtcctgggggctgagggagagctcagtggtgggcacacagttagcttgagtgaatcagagttccatatagcacaggagaaagaaagacaggagaggaagggaaggaactaagggaagaaagataaacaaaacagagctgtatccgatagacacaaaaccaaggcatgtcaagctggtggtgtggtcttaaatatctccttttgttttaggaggcccagagacttgacataataaagtttagttttctgtggatttcttgttcgagtcattcaaagacctcagtaccttctcattttgtctcatcattcaactggtcaggagggcttctccttgctgggccatgccgttgggtcgaagtgtgcctctattattaacctgtttaacagccgagaacagtgatgtacccagcagctacgtgaccacccaggatcacgtggcagcctgctggctggaacacactactggtgatggtgctgctctctgcccttggctcaggcagagccatccacagacatgcggcagctcacgttacacaacagggcaaggtctcagcagaggctgcctctctctttctctcagtgtcaaaacagcagtggagaggagtggaaccttggtagctttgttctggagggtctcttgtggcagagcctggggaccattggtgacattttcatgaagtgtggcactctcccggttggatgaggaggtcttgggtaggtaactgaatagttcacagtggccctctgctgacaatactgggttccaaagggcgcagcagctgttcagcctgagacttggggagagggcaggcaggaggctcacaccaggcagcgcctacaacgagccaggcaccttacggagcctccaggggatgctttccttgggaacatctattcactcatacaacttcattggccaactcctctcctcctgcatctcttgctcctggttgaggaaatcaagccaagagctaaaaagtggaaagcggcaatgatagttggacatagttcctaacactttagtgtgttggttttgtggttaagccttccattaccaaattgctggtcagcagtgagccaggaaaaactaactttgtgataagtctcttagaatgagaactctcctctcctctcctctcctctcctctcctctcctctcctctcctctcctctcctctcctctcctctcccctccccttctctccccttcccttctctcatctccctcttttctttttgagatagaacctcacatttgtagcccaggtttccgggatgacctccaagcccagcaaacctcctgccttagcctcccaaatgctaggattgcaaacatggtgcctctctgagatgagaagtctttccttgaagggggcttttaaatctagtacagatgcagacataggtgcatggctttcttgctttcttatgcagggagtcacacaaagagcaatggagaagtaggtctctttctctaaaaccctggccgagtttccttccacaccaacagtggggtagccgcaccattttggctacaatcccgtggcgtttcattttcacgtttttattgaaaaatcgaaatctggagaattagaacctttccatattgattttccaggggcaagtgaaaattgcattttgtataggaccaaggaagtgccacctagagtggtgacagggctgactctggagatggtgcgaggccaggggagtatggaggccggaagatacagtctttgtagtttgttgacatgacaaaagcaagaactaagtttgatccataggaattgatttcttgcattataatattaatttcactccccccccccagtggacaggagagagaagtgggaacttgggggcagaaaactcaacatttctcctatgagaatgtgggggctgaacactcatctccacttgctggatgctgtaagacaatgcagagaacctgccacagtcccaaatagcgcattccctttgaggcccgtctctgtgttctgggttcagatcctgtgtacagtactttggaaaattgactattttttgaacctcaacttctcatctataaatggaagataataatagaaatactaaataaggtagtaagacctaggtgattgagataagaaataaatactacttgactgacctcatgaataaataagacagttgataatttgagtcattaatttaggtatttgtttgtgtgatgacagtcttttgatgagatggaaatattttttcttaaaattgaaatcctattaggtgtgtgtgtgtgtgtgtgtgtgtgtgtgtgtgtgtgtgtgtacatgatgtggtacatatgtagagaagagaagacaacactcatacacaagatctctctactatgtgggtcctgagatcacatccaagttgttgggtccgaagcatctttacctacaatcctttttgccagtctcaagactgaagcatctcttgatgcaatatgaagtatcacagggtttgtgacatttgggtgaccttgtttaaggcgtgccctatcacatgcaatgtctttttctacccatcaggttcagtgcctttttattggctgagagtggaaaactatgctgccctgaaaagctgctttctgggaaagacattttgggagttcgtgtccagaagcgagtggttctttcttgctgtgtctttttctgcctacccctttttaacacctgtacaatgtcccctcttcctgctccacaagcggggtgatcgtgaacatcaaccagaccactcaaaatgatcagtatgtctctgcaaagaagatgaaaatcctgggactttgaatagagtgggcggggcagcagggagacaccgaaccaatgacaggatgccccaaggtgttccccaggcaccccggctttcaggataacccacaaatgtttcagccagatgtgtggttcttggagcaagaagttaaacaactgctctgaagatgagaagcaccggggagcatgctaagtaactttattgttgccgtgtagtgtgtgttgctaggagaggcatcaacgttactgctggggaattagcgagaggcaagctcagtcggaaatgctgagtgccagaggagaagagaatgcagggggtgggaggaaggggtggggagggcaagggagggatgggtgcctgggcttcgaaattctttctcttcaatggatcctcttccaacctgcctgagtacaacaactggacacggcatgtgacaggcgccgcagatggatcacgtttcctacacgcagctgtaatatctggcacgcaggtgttcagttgtttgcagctgctctgtagcagcccgattctctgcttgggggacagggggaagccccacacttgttgcttccaaaagggaggaaaggggtggaaagtccagctgccactgagtgctggggtactggagtattcagtgtttgacttagtacatgggtctccacctgggtctggaacctgtctctgcggttttggggcctctgcctggcagacttactcaggacaggctacagacaggtgggtggggatggggtggggtggggtgggctaccttcaagcgtagtgggtaggccagagccccagtgagcctgtcagagatgcagtgggcccagggatatgaggcccatctctccttttgaacacttggagatcttctgccagggtctttacttggtctaggcctcagcttcctcatctgaaacttgggtggatattacccggttctctacctcctcacaaggactctgttacaagtatgtaaaatgtttagggaaaccctgtcccttactcctgctctttatagctgaagaaggtagaactgggccaagggcttgccaggctcctggacagggccctggatgcctgttgttcaagtttggctgagcaattttgaggttcaactccgatatcatgagcctctcaacctggatgacctgtttctgtcccctacagccctgccatggaagaaggcggctggcattcaggagcaaagttatcaaagaggggaaaagggagacctttgtggcaatccataccctgacaggccagatttggctgcttgtcctcaatcagccaattggaagaaccaaattaatggtgaaaagcaaagaagagagatttactcagtgtggccacactgggcagaaggacaaagagatcaagcaaccccctacgaagtccagcctcagggtaaagtttaaacagaaagcaagagacacacataaccaagcaggtcaccgtcactgtcccctgttgtctaagcccccaagtgtcctgcaatgtctaccaaccagttgtaaatctttctccaggagatgtgttcctcctcctctggcttcacctggattttagccttttcttttcctaggaggacattcctgagggaaactctaatttcttagggtccattgttacatagttaagtctgatagccatagggagggacacaagtcaggcgggttgcattgtcaccccagcccattggtctccctcctttctctgcttagcacttgtgagtttgagattcttcatggctgctgttactcagaggtcttcctgcccctctgaacactgtggaggccctgggtcacctgcctgcgcgcttgtgtgtactcgacatacagagaggcttgaagaagcaaaggaggtagggcaactgagaagaagggtgccctcactgtcccgccactcccagctctacccgtggacagggaacattcatgtccatgtaacggacatggttacatgtccaccatctcctgtaccttcacagtgggagatgagaatgaggctgtgggaggaagatcttatggggtctcctggaggaaggggcaacaccagactctgatttggatctggtgactcattggttgcctttctgggtttgctaagggaacatcccaaactttgttgaatgggtttgtactccaggtacttttctgtttcggtgataaaacattgaccaaaaacaagttgggaaagaaaggtcatttagcttacacttctaggtcacaatccatcactgaggaaagtcaaagaggggatggaaggcaagcaggcaggaaccatggaggaatgccgcctgctggcttgctttctgtctcactcacacctgtgagtactgccagggccaactgccagaaatagtgatgtccgtagtgggctgggctcttttacaacagttaagactagccctcatagacatgtccacagactaatcgggtaaagacaattactcaactgaaatatttgtgtgaagttgagagttaatgctaccaagacagcacccccaactccaaattcctaaagaaactgtgacagtcttatctatttcaaagagattctttctccttttgttagactcattaggcgaggtgctcactccaaggtgcccccccctcccgggccttatctatacctgcctggcatatgctaagctagatgtttttcctagaggtgcctccttcccagccaaaattctctcaactacccctctgtcaacttactttctcctctgggcctcccaggaaaacaggtagattccgctcttgccagatactgtgctaattaattatcttatattcagtgggccattgaaattggcacttgtcacactacccagttcacagataggacaactgaggaacattacatctttcccagtgtcacgcagttgtaagtggcaggtctggtatcccagtaacatccctgaatctttgctcctttcatgccactcactgtcactaagcgacactgacgatcgattaacagcatgagctgtaggaccttgcccttgcttcccaggtaacggcatgctcttgggggaattaataataatgatgataaccaatagtcattgataataatgatgccattcatttattcagtgagtagacattgggcaccagatgagtgcggtatcttgtagacagaatgaaccagtccactatcacaacgcctctgaaatggtagagaggcaaacaccaaatatgcagcacacaacttcgttagcctgtcaattatgcttacattaggtattatgaaggaaaacgtattgtgttggaagggaagcttgtttgggggcaattaaggagggatttcctgaggaaaaaactgtattgtcacctctgatccagtgaggacagtgtcctggcaatctgtgggggctgggggagcacccagatgggttgatttcaatggatcaagaaattaaagttctcatgctcagcctagaacagaggaaccagtatgggggaccccagggaggaatccccagctagagtagacccaattgctgtctgtgggcctgtatttttcctggtgcttgagggacagtcttggtgaccctcaccggccatttcacgagggatggaaaatcacttgttgaaaacgtgatctgagtgtcaagacccaggcagccagttaccatccctcctcctgcccttcctctgatcctgctaggagactgcctctgtgtttcccagcgtatgtttgcctctctcttgaaaatggaagtccagagcagctcctgcaagctctggacttcacccaggtagcatctccctgtggacatgtgctgcagctcaggcaggcacagtggagtccaccagagacagagccccaagaagggagaggcagaggcaagcctgtgacggttgctttctgatggggtggagtgaggctcctccttgccatcctgatacagaggcccagatcccttcattgtacgatctagaacttccctcagcgttgctctggacaccctggacaccacacgtccatgttttattcccccaagatatgtgctaggcagagggttctctcgagcacccgagccaccttcctgcttgtgaggtgtgtttggagcactctgagctggcaaaggaaactcggagatattttccacacaaaggccagcatccctgcaattgcgtcctcgctccaatggtcacacagctgagcctgccatacattggtagctcgttattcctccagaccactccgctactactgtggggacaaaggaaaacaaaatacactccttcccacaagaatcctggactctcggtttatgatcttttgatccccgggcagcccaccctccccacgagaatgcagaagctcaagttgggaaatcagaagatggactggtggtgcttaaccttcattaccaacttgatgtgtctcctaggagtcacatctctggttgtgtctgtgagggtgtgtccagacagatttaaccgaggagggaagattcactttgaatgtgggtggaccacccactgggccacctggtcacccgctgcagaagctgcgttgctgttgactgtagttttccttgggactgttgctttctgcttaagagagacttggtgaccacatagctgaggatgctgaggcagagcctctttaaatatgaagaaatgaggaactgattcgaaggacgtctcactacttttcccactaacaaaccgttgacgcctgagaaatttttacataatcctgggtacgtgggtatgtaaaatacatgtacaaagcaaatatttgctgataaattatatggaatgtagatttcaaataacatattaaaaaattaagagtaaattttcatactaatgagatggctgcatgtgtttatttttttcatgtaaagaattaaattgcagctgaatattcgatgcggctggacacagacatctttaacattttccagagttgattaatattcttgtatcactgatgaaagtgctgtttcacaaaatatcagcagtacgtttagaaccgtttcagaaatttctggaatgcctccctaattccaacccaaaatttatttttatgaagctcaagttggaaactcggaaaattttaaaataaagcatgataacacgttacaacccagaagtatactgatgtgatacctgctgaggtctgaggataggaaaatattgaaagtctttgttttctgtaattaaaccgtcatgcttctgtaagagcgaaaactatgtgtgagcagtgaaaacactgcagcttataccatacagcagtctggaatctcagccaaggtatttcatttggtactggttgatgctgcaggtcacagcagcatgtcaaagtgcatgttgtgtgttcaaaacccagattcagtggagttgcaggttgcaacatgtatgaatgctacacagacttgttatgtttgactctgggttcctgtttggttgcgtgtccagaaacctcttagtgctgccaaatattttgcacccccacattcacttacacatcacccacagtttaagaacttgaggtctgggctcaataaaaagcaagaggacctgtgctttctcccccagaacatacataaaagctggtgtggtggcgtgtgtgtctgcaatcctagcactggggagacagagacaggaggatccctggaccttgctggccagccagtttattttaattggtgagagaccccatctcaaaaaaggatgaagacacttaacatcaagccgtggcctctatgtgcacacaaaaccacatgtaacgcacccccccccacacacacatgcacacacaagctggggtctaacccatgtgtactatctaattgaccccactataactctgcttgtagagctctccttttttaaaaagggttgtgtgtgcacatgcgtgagtatgtctgcacatacatttgagtaggttgattcccgaggcagctgaagatctccaccagcaaacagcatggtacttgggagctgactcgcacagcttgcatcctccagcatttccggttactgaagagacatctctacaggagcctgatgctctcccatcttaccaaatccccttcagtgtcaagatttagaatttgaaagggggctcatccatttctggagaagagtggagtggaccattccactccggaaaggagttggatacattcaggaactgagacagactcttactgaaaagggctctgcgatttgagtcctgtgctaacatgggcccggtgcacactgggatcactaatgacatccaccattcttttgcttgggacagttgtgaacagctgccttctgttgaaatacaggttgaacgattcgtagtagatcctcagtgacagacgggtcacactgctattatcagttctctaagagttgtcacagatgcagtacttctcttcagctcaacaaacactgagcccaagtctctcatttttaacaggctttattatgtacaggtgttttaagttcacagcaaaattaagtgtgtgtgtgtgtgtgtgggggattcagggagttcccttacaggcccccgactccacacatgtgtaatcttcttcactagagtgtacacctgttttagttatgaactccctcagcccatcatttccacctggcatccataagaccattttgacccagtattccaggcccacacttcagagctgaagggaaccagttctcttgaactcccatgtctgacctgatattggaaactgttagagatgaccaaggaaaccagcttcccaggaatgggctgatgtggaattacccttctgatgaactttgttaggagagagccttgtgaccgtaggagtgggaaagcattagaagaggcagaattacatcagaggtgacattgtgggttttgtgattttaaaaagtggcgcttgagagatagaccccatgtgacagagcttgggtggaggggtttttattgggggaagtgaatgggaaaaggcagacctgtctctctccagaaacaggagccacagaatatatatatatatatatatatatatatatatatatatatatatatagagagagagagagagagagagagagagagaagagagagggagggagggagggagggaagaagaaggagagacagagagaaagcagagaagcagagagagagaaagagagaaagatgggaggtaggcagggcccttttaaagggaacatagtgactacgcacaggtggtgctcttagtggctgcagctgagggtgtgtcctgtcagaaccgcaagggtcggccagtacagatgcctgaacactaacagtgggggcttgaaggaaaagaagactttagtcctgttagacagagagtgctcctgcctcttggttttcaggttgggggaggtgtgctcctctccacgtgacctgcctgtgtcagaaggcactaatgagaataaagttacaccccaaggttgtctggagctgctgggcaaagagaaagaaagccgtggtgtgctttatcaactctgccccagagagctgtagtgtgagtgtgtgtgtgtgtgtgtgtgtgtgtgtgagagagagagagagagagagagagagagagagagagagagagagagagagagaggagagagagaatgtgtgtgtgtgagggagagagacggtgagaaaatgtgtacgacagagagtgtgtgtgtatgtgtgtgtgagagagaagatagagacatgggggcatgatttctgggagaagacagcagatacaagcttaaacacacctccccaggctgtagttcacagcttctaaaacatttaggaaagggatatttctgagagccaactcctacaaattcttttctgacctccatgtcacatgcagcatgatgtgtgggacccaccccaaataaactaacaaatgtaataaaaacatacaaaaaagaagaaaggactcctttccatctctttcttcctgattcagaatgctgactgctggcaagagaatggcccagctcccagcatcagcatctctctgtgactctagccctacagggcagacttcccggagtcctatgcttcctcttgacacaaataatggagagctgtacaggccacctttgtcactctcgctttggagcttggggctgtgggctctatccctggatgtctgtgatagttcattaaaatttaaaagtcttaggcagttgtgaatacagaaaaacaggatgatgggtgaggcatctttagggtcgtgtgttgtgcccgagtaagaaaagggaatactggggtggcctggtttattcagttttccactgctcaggagaacaaggcagccagcagttttttttgaaggatgtggcaaaagtcctcttgacagaactaaggaaactaaggagacattgaccaaggatgttattaataaaaaacgtggctccatactcaccgggtacaaaggccttactcactaattgccttcagcattttaattactttttaataacatgtcactactgctatcaaaatctgacactttctcatcagaagtgtttctggttttgacttccactaagaggaagggactgtgtgcatcaaaagcgcagcttttcttctatttctgggccctgttgactttcagggtagtagagaatatttttcatgtccccagtgagaactctaataaagcaaaagagtatgatactatgatcatgagagagagagagtacatgtgcagagtcatgaaacgcatcactcactggctgtgttttccttagaggtattggggactgacctgtgtcatgatggcaggctggaagacactgcacagcgtgctggtgcttcttcctgctcactgctgtgacccaaatgccatgcatctctgtgcctggatcttatctatggctccttcctagcctgtggttcttcctgccccatccttcccaggggaaaatggccctgaaagctatgcgcctgtcacagcccttctcacacagcagcttccgtcacactctactgggactaatagaaactatgaaaacagcgttttagaggccaaacacaattaaaaagtttctttactgaaggactttttggagccttaagatgctaataagcattgcaaattttcaaacatgtcccccaaatttacttgactgcgatcctggcaggaaacagatggcccattcaaggagtaattgcagggactattaacaaaagtagaacagattaagggaatcaacaaggggatgacgaagtacccaggggccctggcagcagctaggagttgcttttacctgaggctttcagttaaaggaagggaacagacatgccaggggtgggtacagcttgggaaaggacactgctcatcagaaactgagccctaccaccaagggacatgttgctagcaaacacagcattgcagagggacagtgctctggcttcttctttctactgtgttctagagtcaacaactggatccagcttaaagccaaaggtcctggtcatagagttcagagaggccaacctcccgggaaactgtagaaccaaggagatagaagggagctggggacatggctcagggggtaaagtgcttgccatgtaaacatgaggacctgagtttcagtccctagcacatgtaaaagctgggcatggtggcgtatgcctgtgatcccagcactggggaagcggacacaggaggatccctggggcttgctgggtcagcagtctagaccagtaagtaccgtgttcagtaagagacgctgtctcaagcaaataaggaggagaaacaattgaagaagatacttgatgaacgtatgcatgtgtacctatacggatgtgtgcgtacatgatcacatacatagggacagacgataagataaaagacaaagggaagacggacagtcagaacacctgctaacagcaagagctccgctgttcagacagaacaggcacgaagcatcaagtcacctcactgggctgagcaccctcatgccagctgttcacagagagctctccagcccctcctcccgccctctactcccgccctacacttctacccattcccacacaacctgggccttcacctctgactgcatgggcctctctgtggagactctgtcacttgataccacttggctgagtggctatcttcctctataggggacttctctggtcacctcaggtaaagttcacttctttgctgtcctccagaatgggagccactgtttccgataggacacattcagaagtgattttgtggctttcagggagagtagtgacgtgaggggtggtgtttggggagctctggcgtatcagaagacgtagaacaccatggtggcctttgggattggactatttgagactaagtgttcctgggtgacttggaggctctgcctttggggccttcaacattttcaacccagtcatgaatcttacagtagaagtgaggttccaccccccaccaccctcattcccttctccatgtgactagtgttgtggtccttgagcctatagtgccatcttctcctcaccccagctgtcacagcaacatcaggtcacagctgatagctgatgtgctaggggtaggttgtgaaggaatgagctactcttggggaaaaggtgcctttagtgtctggggaagctcatttttctggaactaggatggagccacacctgggttctccctggccaggggatgtgactgtgttggaccaaagctgcacagggaatgaggaaagggcaggcaggacaatgttcccgaggcaacagaggtgactgaacaagcctggacaagcctggtcagtctctccagtgctcacaccctccttctttaacttcagagctggaaaatagctgccataccaaccagctacttcccatttgtgtcttcttgtctgagtttcagcttaactgggtgcaggtgacagggccctgttcagcaagagggtctctggaggatagtgtgacattcattggaactaaggacatgggactgtacctgccccatggctctgttccggtccttatctcaaaggccggcatgctggtttctacttcctgatcactctgtttcttttgagcttttcaaaattatctgattggtgggcatgcaagaccctgtcagtaccagacaaaagctagaaagacagacaccaatcagtccctccctcttagaggcatggagttcagattttaagggaatcgacaaaaagaactgtatctcttgtggtttaaagttgcagtgaagttttaggacctccactctctctatctgttttgtttcaatgttaaccttttaaaggtttgaatagtgtgtgtgtgtgtgtgtgtgtgtgtgtgtgtgtgtgtgtgtattgctggtgtcagggaacaggagaacaaatatgatccagagtaattgcagatccagggattaattttcaacagtgaaaacattttaaaagacaggaacaccgagaggcttgtgaagaagggttgcagtagaaggggaggggctaagagagaatgaatgacaggtgtggttagagcacattttatcacgaatatgatattataaaaataaattaatcaaaatgttaaaattaaaggcttcatgggaagtcactggcttttaaagaagaaagggaggaggaagagaaggaggaaaaggaggaggagaggtagagagtgtgatgtttccttctctttaaacttccccttccctttgggaagagttagatgctatggagaagcccacagtgctttgcctgggcagcatttctagctgtctgctgagctctggtctctgttcagtctcctcactgttctcccaggcaggcattgctgccctctgtgggaccagaacctggactcaatggaatggaacaaaccggggcactgtaaggtcaaatttctctgtcaccatctgggagtcctagagggtcagaggggaccacagtggtctatgtcccccactctgtgcaagctgccaggccctcccaccaacccccggggactgtgaccagccacaaagctactggactttgctctgtgtttgggtagtgggcttccctttctgtgctgctgggggctggagcctgcctttcttctttggtcacagcctgccctctgcctctgggcaacagtagggcgatttctcttggaggtggctcttcctcagccagcctgacctcacctgcccttgactcagaataggcatggcctctttctccctcttctccccctcctctcttcttcctcttcttccctgtcttcccctctggccattcctgattttccaagcccggcacccaccgctatcatcttggcctccttgagctttacatgccacatggcaacatcagcactttgatgcaggtggaaaaacccaagagccgttttcttctggggactaaaggactccagactcctccacatcagaatatgcacaaggagggcagggtttttttttttttttttttttttttttttttttttttttcaaaacattccagttccttttgatttaacgtgtttagagcactggccattcacaaggctctgagctcagaatgtcagagaaccccaacatgcttaatacacagtttctgctttctggaagcttttagccaaaccaatatgctagttagtactcagaggcaaggcaggtcagatggttcaagaaaagatgataccagctccagtgatgagagccggcaccaggcaggggccatagagagccagctggaggcagagccaagaagatctggccatctttcctaaaagagtttactagatggatagacccaggaattccaaacttgaaggagccttcattctgtagcaccctgcccccagtttctttaatgctcacgtttggtactgttcattttaaaacaaggtgcatggttgctcctgggagcccagagggaatgttctagatcccagatgtagccataggacttcttacttctagccagatccatggggatatctcagtctctgtattaagtgtaagatgtgtgggtattgcttgtgtttttcagggatgtgcctgcccctggtgatggaactttcgctattgggatgtggccactgggattctatttagtgttctttcctctcttttgttggcattgtcacacagggagcataacttttgactttgagtctatggaggtgctgtctctcaccttctcctctggtttctctttttaatttcacaaagaatctcagcgaggcacagtagcggatgtggggtgggtgggaagacagcatgtataataacacattttccagctgctcagtccccagtgcctcccggtccctgcaacctccatcccgaagatcacaaaggtgcgcactgcagagtcctgacagattgctgatgtccgacaagcacctctcacagtgaccattttgtttttctctctccaaattgttggcagatggagtcaatggccacttggactcctggggttggtcctttggttcatctcagccacactctagcctcctcaccttctgctgccaacggtgtctccttcaaggacagggtcggcaccatccctggttaaggagggcccagaagagagttatgaagtcatagataccaatgacaagagaagcaggaggaggtgggttcgtgggtctcaagattggaaatcaaagcgagaaaagtacatagatgcaggaagattttgatttatttcatttcagttacttggttaaatactattgatgaggggagggggaggggcaggcaaagatccagagagctttactgggaaatatctattggctgtatgcggatgagggcaactgtagggctgatgtcccagcatgccctgggcgtctcggtgtcctggtacaatgacgtctctgctgccctacttctcttccaccagcacctgctcctgtgttcctgaaagcagtgcctggtatatttttctcctttatgtaaggatgtgtattattggatactcctgcaaccaacatccagcccacactggaactccaggtcttttggaatcactcaagttgaaattcaaagtaaacaagatttattctgaaaactttttgagaatttcaaaactcacccagttctataaaaaaaaaaatctgtatccttctgtctgctgttgtcacaacaaggaggcagggtccctcctttagggaggaatagaggtaccccagactttgccttgctggtctcgaacctatgatcctccagtctcaggatttggggtgctggaattataggtatgtgctatgtgtgtacctggtaggtttcttgcattttgctattgtctctgctttagtggcaaaaatataagccaatttctcagagcttctgtggtatgtagatctctggagggacacacacacacacacactcacacacacacactcagacacacacacacacacacacacacacacacacacacacacactctctcacacacacagacacaatgcagtattggtgtccagggctcctgtggtgtgtagatctccagagggacactcatgcaatgcagtactggtttctaggtcctgttgtgctactgttctgaatcctcagaggagtcctgctagagtcctgggttgttaggtttgccttcattttccagtgagaaagctgagagtccttggagcaaaggtttgaaaccctttcttgagctccagggaaagttaggatatgggtagggctgggtggtggtggtggtggtggtggtggtagcatgtcctaagttctccttgtcccttttctctgctgcttctggtctgctgtgcagatgagagacagagctgggcagagggcagtgaagaacatgaggaagaagccagaggccaggtagctgcacagagctatggggtgagcttgcgctgcatgactggaagcctcactccttttccttcagctactcagctgctgtggcctccctcctgggagcttgtaatgtaactcccctggccagtgggaggctggcctggaaaagcagccgcctgtcctggtggtggcattcctgggctcatgaccagccggatcctgcggcaggcaggcagggtgcctcctccctcagctccacaccagagactcgctcttccctctaactgggaggacacaggcctggcttattgattctgatcctggaggcacttaactgatttctgatggattcgccccataaataacccttggcagctgtggtagcctctagtctctgtttttagaagcagagacaacatgaaaggaaggtgctttcttggtaagggctaacctgatacatctcatccttccttctgcagcccaccgcaggggatgggcagggagcagccactgctttacagggttaggtcagcgggtgttgcatccctactgcctgcagtctgtctcctctgcatttcctgacacacacacacacacacacacacacacacacgtgcacgcaagcacgcatatgcacacacacacagagaatgagcaagagagacaaagagaaaggcgaaaggtggccatatgtgtacataggctgaatacattatgcctatatatgtttttctcatgtatgtataagcatatatgtgaatctacaaatatcagtgtatacatacatggctataactcagtgcgtatttatacaaatttatacatgtataatttgcacatgcatgcataggtatatttacatgtacatacatgtatatgtgtgagcacatgtatatacataggtgtgtatgtacattttaatctttactgtgcctagcacttcatgcatcaattctcatggcatctcatgaagtagtcaccattctgcagataaagaatttgaagctagaggacagctgtccatggtgacatggctagtcagtagcagagcagagactgaacccagtgctcatttccttaaggactgtgctgttggctggtctttcctagcccagtgtgcccgtgggatgaaacccttagcccacagcacatcctggcttgggttccttttgaggaagtcaatgtggctacactcttgttcttttcccagacttggcccattttcccccctttgtattttctaatgttatcaaaacaaacagcatggttcatggtgcatgggtcttaatttgccttattatatagatggcacatattccttaagaacccattaagtttcatctagcgcgggctgagaccacgtctgaggaagggccagggttcatccacagttcacgtggtagaagtgagtgagtcacccatcagtggcacagccagggctggatcacccggcagcttccttccttaaatgggcagagattccaactgctgcgtgaataacaaagaccttaatgtcccactggccagtggggaccaggccagcaagcacagggactgcagcagctgtttttttccagcatgctgaaggctgcaatcttaaccctgttcagctgtcatggtgagaccttgtggggtccatctgagagggcacagatggccacggggccatgggttccacccctggaaaaccgctctcagaatctgtcccatggacagaagtctcccagtgtgctccacagtctgccccctgcccagagaagcactgttctctggaggaagagtggacaggttcatttgaaaatgctttgggcaggggacatgacaaatgtttaacaattcaagggagacaaaccgtaccttccccgtgacactgttaacgtcttctccacttttcttgttcctcccttttcagtcttgactctctatgtctgcctttctgaacctggctaaatattagacagatggaattgttaagtggtcattatgcagcatgcttccttgttaactagagatgtgaaaggtcgaatccatgcgaaggtcactcctctagaaacttctagtactttcctgtacgaagtgcaagtctattgaaaaaaaaaaaaaacattgtaagattccacattgattatcatcacctggaaaaactcatcatgtttctgatgaaaggggaaatgactcaacaacacagcataaagaagcctgagcaagaggttgggaccagaatagcataaaggttagggccatgagttatggaagcaggccacaggcctctgatgctaactaatttcttagagcacaccaggtaatctgaatctcagttttctcatctaagaaatgggaacagcttcctcagggccattgttaaaactaataaggccacctggaatggtccatagctagcaagagcttaggaaatgacaaatccatctccctccccccctctcttttcttcatccccactcccaccccttaaggaatccatatttttcacctagagtacaaacatcactcagatagcctttggcagatcactgtaggcacaagctggctacccagaattatttgctctgtcccaagacctgtctacgttacagggttgattgtgtgcctctggttcccagccaggctgaggaggcatgagggcctctttcacgcttatgaatggctggggctggtgagctccttggatgagcttctttgttcatatgcaagggaatggggtcagtgtccctcccctgcaaacactgtgcccacatggccgccccatagacagattgctttgttgttgctgctggtgctttatctaaactttctttaaactgacctcctttctccccagtgtatgtgacaataattggcaccctatcaaatgtttctgaaaggaaccccaatggccttggttaaacgccaaataaacagtccccagtccccagggaccctcccctgacagagtgtggggcactgaccattgtggtatctgcaagatggaaagaaacttagggttcctctctgctgaagagaggcagcacagtgcctggtcatatctgagtgactattcccccactctttgtctgtctcccctgtgaggcatccctgtcctctgacttggcaactggtccagaatcaacaaacatgttgacttatgctaagtcctcttggctcccccttcccctgctcttgcctgatgcccagggctatgacatggaattaaaatgtggccaagcacccaatgaagctattgaggtctggactcaatgagcatgacctgcccatctccaggctggttgggtttcaggactaaaactgcccagtgtgctcagttacttcttgacactaattttgtcatataaagtggccctgaaagctagcacagtgcacattgtaacctcatcctgtgaatgaatttgagaaagaactggaagaacacacatcaaaacactagggcaagttgtagctgtggtagcgctgtagtttattttattgtattgttttattgcttagctggtggtcatgtttcattttcacagaaaaaatgctaaaaatgtgaagattacaaaatcagtcgacctcaaggtacatcattctgatctcctcgatgagccaaacggtgtccctttcccccctttttttcaggtataaatcattatttgctttgtgtgagctgttgagtgctatttacaagtctattttcatctaacaagcttattttggaaggataaggtagacttagagggaattacaggatttgagttgggcaatgtcttggatgcagtgcctgttttgatggacaagagaagaaatgactaagtgcctttggcagagaggaagcaggagctagcgagccacttcaggtttttcaatgggctcaagtaattgcttttttcttagttaagaagtcggtaccccctgagggggctaagcctgatcctttctctcccgattctccaagaccatttggttcagaagcacatttgtatagttagggccctcagtgcttgtgagcatatgtgctcacattccacctctgtttaaggacagcaaggcttcgtttgtgacatgaatgacctgcttggtgctgtcagacctaaggaagctgggtgcctgtattcagcacagggccccgccgtagaacctgaccccagcaggcggtagagggcgctgtacttggacctgccatttgctccctgtcatggatccccattctttctgctccattgcttcctctctgtccatgagtgatggacttactgatccagtgtttcactgagtgtattctttcttttccccctgtgccccagagagatgcgaatgagccagtgccggcccagggcctgcgtacagactgcggctgctgagggctggcactgcctgctggcccgtgagctgtagcatgggagcaggggcatgccaagtctcagcagagcagacaaggcttgatggacgctggcttggttcaggcagggtgaaagtcctccgctttggagaggctgaggacatgttgggagactaaggcccaggtctgtgcagaacaccattgcttccctacttgtttggatctggtgatgagcgtctgggtttgggaggctggtgggggacaaagagcaaagagatttttaaataccctggagctagcctggggagcggctggagatgagctctggggatgtggcagaaggaagcgatagccaacatgtgaaaacagtagtgaagccacaacgttactgttgtccctcataaaaggcagtcaatagtattgctcagggtccagcgccgaaaagaagaaccaaaacctggccaacaagatgtttcgattggtaaagacacttgctgccaccctgacaccctgaacaggatccctgggacccgaatggtagaaaaagagaatgcaaaaatatacactgacttccacacttgtgcccaggggctcacatgtccacacttgtacagacacacagagatatgtgaataaataaacagataaataaacataaatttttcgttgtgagacagggtctcactatgtagccctggctgtcctggaacttactctgtagaccaggttggtctgtgattaaaggcatgtgtcaccactgcctagctgaaaaaatgtaatttaacaagtcactgaaaccttgtcattaaagagaaccctaagaatcaggtgcttggaaaactgtccaatcttacattcttagacatgcagctttgctggtaggacaggagcccctgtcaaaggtgcttcagttgttaggaggtctgtgagctaagccagttacccatcaaaagcctgtggcacccccccctccacctagttctgttgttcacataatataccctgattacagtctctgccctcttgactcctcccagttcctccccacattccccctcccacctagatccactccctttctgtctctccttagaaaacagacttttaagggataaaaataaaataaaacatactaagataaaacaaaaacgaacacattggagttggacaaaacaaactaacagaaggaaaagaaccaagaaacagcacgagaatcagagacccacggttcccacactcaggaatcccataaaaacactcaactggaagccatgcatttatgtggaggacctggtgtagacccgtgtagaccctatgtgtgctgcctcagtctctgtgagttcataagaactgtgatcttgttggtttagagggtcttgttttcttggtgtcctccatccctttctgcctcctcttctgagggttccgtgagctctggggtgtggagtgggagtgggatttgatggtgcatctcccttagggctaagtgtcccaaggtccctcaccctctgcataatgtctggctctgctcctgtctgctgcaggaggaagcttgtctgacgatggccgagcaaggaaggaactgacctgtgagtatagcagaatgtcattaggagtcatttgattgcttttttttttttttttttaagagtagtagtatttggttgtatactcagtctctggcctatctagtctcagacacttggtcacccaagtagtgttgggtatgggctcccttaaatcaaatcagacaatggttggtttctccaaactttgtgacaccattgcccaggcaggacaccattgtagacaaaggttgtggctggattggtgtttacttttcacttttaatagtgtgcagagtaccttcctgcagcaatgatgctagcacagaggagtgaggtcaaggctctatgtaggcaccagctcctcctctccatgttcagtgggttgtgtaggtgttgtcttcagcaatggggccttgctgtcagtttgtggagagcaacctatagtcttgtcaacagcctgggttgcttgggggtgttccatgagacccctgactggaagcttcatttggtgacaagagatgtctagttgggagctctgtctcccccattatttggtgatttcatttagatcaccttcacatatgtatgtattttaggaagcatctgctatattagatttccatattacccctcaagtggcccttaagtttagctgtctctccccatctgcccttccttgacccctcccacttcttctgttccagcccctccaccccatgtgtttatttctgtttcttttcctgaagagatctatctgctcccctgcccccagtgtcttactctgtacttaatctctgtggttctatggattgtagcttggttattattgatttaacagataatctccacatataagagaatacataccatatttgtctttctggatctggcttacctcactcaggatgattttttctaattccatcaatttacctgaaattttctgttttctttttcctttctttctttcattttttcaagacagggtttctcagtgtacctttggctgtcctggaactcactttgtagaccagtctggctttgaactcacagagatgcaccctcctctgcctcccaagtgctgggattaaaggcatgctccaccatgcctggccattgttttttaaatgaccaagtaatactctattgtataaatatacaacatttcctttatccattcttctgtttaggttgttttccagtttctgaaaagcctgtgtttttgttgacctacatggtgactcacgaactgccaaaagtgtaaagataaatcttcctttggaacttgacttcttcaatcaaaacattaaaaattacagtgggaatggaagatgaatccaaggataaaaggtagaaagagagctgtggcagagattgcgtgatctttttcagaggtagaggtcttgctgagggtacacagggctaggttaaataacagccctgcaaaaataatgattactaaaactattttaaaacttatacttggtccattgtaagttgagaatttgtgataatcaaatgtcaacctatagaagcgtttccttgttggtagttccttctcagagaatgaacattaatagaaaaaaatgtctgaccaatatttaaaagcactgatagaagaaaaaaattctaaacacaactatttcagaaaacctaattacagaaaaatgatggctttcctaaccaacatatgatgaacattgctggttctcatggggatagaggaaagtcaggggtggggagagctgcaaagatgcaagagaggctctactgataacattcaaaatcaagagtatccagggtggcaagatggctcagcaggccaaagcacttgccatgcaagcctgaggatgcagcccatcatgggaacccctagcagaaggagagaaatgcttccacacatgccttggtatgtgtgtcctggaatacacacacacacgcacacacacacacacacacacacacacacacacacacacacacacacacagagccagtgctatagactcaaatgacctgagtatacaacaggctaatttaatctaaaattttaaatgcaccactttcatgtccacctttttgaaaggagaagtcccaattctgctgtgtacctcaccaactggctgaaacctaccagcagtcttcagttcccttgctgctctgggttttggcagtatttaatactgttcactgttttcagcttcttgttcacaatcctgtaccctttctcagcccaggtccaggagtatttttgtgatgcccttcttaggtctcctggtcccctaagaccacagttcacccagggcttcatctcacatcttctctccttaatctgagcacttcctttgcagatgctcatgagctcccagcgacccagacagacagtgagtcagaaataagtgctccaagcatcttagaggaaggctattctcctagcaacacggggaagaaactggatggtggtacagcagaggaagtgtgaggctagaaggctttgtgattcaggagacgttaggaagtgcttttacatcttgatctccggcacactaggtttacttccattctgcctcttgctacagcatcttgagtgaggggtttttatacccccctctatttccagtctggaagctatttgagagaaaggacagacttacatctttataggtttagaatgctcaaaagagaaattggggtatgaggtactttcatcaatagggcagctgggattggaaggaggaagccatcgggatgctgatggcatctgttgatggcactggtagaccagttggatgtgagaatgtgggaggagttgaggaggactcagtgccaaaccagggtggctgggatggtgacaccattatccgagggaaggtgcccaggaaagaaaggaacagtggagcagtgtgctgggcctgggttgcagacatatcaagacgctgtgaaatttggatggggagatggttaggaggcagatggaagcacaacactgtgctgatctgccgtgactcattccagaaagccaaaagcatctgaactggaaatttaaaaaattatattacacgctgaacactggcctcacaggaattagaagagcccttaaaaatcaagagtgcaattgtttattgaccacttaaattctctctagcattcacctgctgacccttcctgcattttggtctccattggcaagctttttccgcacttacagtgattttcttttggagtcaccttcacagacctcaaaggttcattgaactctcagtatttagtctctggcattttcatcacagatttttatcagtcatctgtttagagagatcatctattgaacatttctcaacctggcttgggttttccctaaatttactgcagagactctctgagactattgctctagattctgtaagaggcgttaggttaatggagagtcctcttacagcttggggctggagcatgggcatgctggctctgaggagagctggagacacactgcctcatgtggatctcagctgtcctacagttgggagacattgggcaggtgactcagccacttagaaactttgtttctttctggaaatgaagacactgatggagttaacctcgagtccttgagagaatgctttgaagggacagggtttaaatcatcttcataaaccttagacattgttcctaccaacttagataaaaccaccacacaacaatctgcaatagagaacacattggagagaggaagatgacagaagctcttctcacatcaacgaggggaaatgactggactctctcaagtctaaatgaaatatgtagtgaggaggaagctgcagtaaggagaagagagttacagttttccaaaggagagaatctcagagaaggagcggcttccagcgtttagaagtgagaatgtttgcgtcatcattgggaggcctgtttgaaatactttggctaattaggtgataattaaattgtgcagtccccatatactgtgctttcttctacacagaatacatctacctggaaagttctaggtatgtgcattcttgaagaaactctcgtagagtttgcacacagcaagcccttgtgccatgagtgataaattaccttataatgctaaaaatataagcattgagcatacttgagcacttaacatgtgctttgtgaagcaatctcatttaaaccccttgatgttggcactgttgttatttccaaacagtccttggagaactgaggtctagccagctatgtatggatctatgatggggcccagacctctctttcatttctttgtgtgtataggaacagaatgcaactgcaagagaaatgactacagccaatctttaaatagatgtggctactcaagaatcaagagaggtcagcatagctgattccccagtgccatgagatggtgggggagtcttggagatgctagatagaggggtgaggagggaggaagaagaggaggaagtggaggaggaggtggagaaggaaggggaggaggaggaggaggaggaggaggaggaggaggaggaggaggaggaggaggaatgacttggagacaccgagctcattagaaacagactccggctggcctatccattcccctttcctataattctctcctttcaagacagactttgtttccaaaatctaccatttctttttcaaatctctattttttccacatgattcgccttttaactgaattgtcctacttcacagccctaggtggaaaatgcattaaatccaccatgtattttgtgttcattcccttgacaaactttaacacaaattacccccaaattcctataacaaatttgcaaggtgatgattctttgcattttgcagatggagaaaaagaggcccacccagtctaatcaaagaaactaacttgacataattagatcaagggctaggatgtaggcctgacagattttaaaggctctctttttcatttctctatgactgtggagccttgcagtcatcatttacgatgtagaccccctgtcttctccccttcaggaaagttttaatggaattcttaggaactgaacattccacaagcctgtcaaaacccatactcttctttgttgttgctttgttttggtttttcaagatgggtttctctgtttaatagtcctggctgtcctagaacttgctttgtacacaggctggcctcaaactcatagagatctgcctgcctctgcctcctgagtgctggaactaaaggtggacacacacgatacctggaaaaacctgtacttaatgatatgttacaattaggtgtctattcagcttttgaagtataacttagtaacgacagagacagatgcatcttcatatatctatgtagtagtatatcttttccctctcctccatcttccaagctaactttctacatagttcaccatgtaatatgtcactagtaagttactgatgaattaatgaataaattagtcagtactaaggagcttgtttgtaaagctgtgaacttcttcctctttgccagaatattgattctgtctctaagtatgttctctgtctgtgtcctacactagagtgatgaacatgaagcagatggctagccatggagacttctatccttggaatcccatgcctgcttctcaagccagtgtgctagaaatgattggcgactgaactagtcaggcccttggccaccttctttgtggccccaacaaatacaataccagccatagtagcaacaacaacaatagcagcagcacataacctaaggacagtgtgacagtctggctcaaacccatcatttagcacgcataagtccctcacatcaacactaatccccacagattcatgctaagtgcttcttcaatggcttttgtggctcgtgttttctcccagtatttgcctagccaaatgtccaagcagtttacgttttaatatgagaagaaccacttaacctcagctagattcacccacatcccttgtcatccgttccccagcctctgtcagtctctgccctaccttcttttagatcccagccgcctttcttccttcaaagcttgacatgactttcatctctggagtctgagctgattgcaaacgcactgagccggcctctctgtttgaaagaatgaacacctctctcccagcaactgagcaaagatgagttgtcatctgacagaggaatacatctgtacaatgaagacggcactaacaatgggcaccccaagtccaaaagaggaggcatctgccctaatgttttggccacagggtgagtggctataggtcatttcactgattctcagagttggttttcaaggaaataggcttcacactgtgggagttccatcttgtcttgagaccatccaccctgctttggactggttgccccagtgtcatactgccttaaatttgtcacgagcagaagtgtccaggttcaagagacaaaggtttccccactcctctttctctcctctttcactccaggctacaggtccagctgtgactatgtgtgtactgtgcatctgaagtaagagaagactccggaagagaaaggacagccagccaagcagaaggctcagacacaggaacgtctcttccatcaccagataagggctcaaaaaggcaggcaggctactcctgggacattagattagccttaaagtggtcccagtctctagacaaggcaagctcatcccagagacattcctgggagccttggggagattacattttttttttcagactaaagacattatgcaaatgcttagggaagagccattaactgattaacagatgagtgtgaattgccttttctgattaggtgattaatacctattgtgaaccagcagagcccaaagagaaaacagtctgatgaaagattaccaaatattttgcctatactgttacaagccttttaggtaggtgtgtgcgctctcattctgatctgccatacaacaaaatgatttcatcacagggaaagacagagagtagagaaacgcaatctccaggaaacctcgctgtgctctctactcccgcacacaggtagcatcgcctgtggaaacggctgttttcccattttgatgaagagtcagtcttggagcagccatcaatcggtccaaggcttgagccaggatgctgaagggatgaactcatcaatttcccgcagggagggccagccttccaccagtattgaaagaggtaacaggaaagcatggcttactctggggtgagttgttcttagtgttgactgtgaagatgatgattgaaaaaaaaaaaaaaaaagaactgtgggactggtgatgaacgctgccgagcccttcacatttgctattgtatttaatcttgagaaaagcacctgggaagtacacgttatgtacattattttacaaatgagaaaattgatactcagagaccgagtgtttgaattagaatctgcgtctttctttctctgatgatgaagcagtcccctgtggctggaggagaactctagttggaaatacctatgttagtttttccattactgtaacaaaagaacccgagataatcacattaaaaagaggaaaggtttatatcagttcatggacgcaaaggtttcagtccttggtcagtaggcgctggagaaacagtagttcctgtagggactatacggtagaataagctgtttgtaccattgttgctaagcaacaaagaaagaggtggaggggcagggtgccaatacccccattaagagcatgtttccagtgctctaatttcctctaagtcccaccccctgaagactgcacaacctctcaatagctccatgggctggggactaattctgtatcacacagccttgggggacactctatatttaacttacagcaatactcaggggcagcatgatgcttccagcaccagaagctctaaactctaggacactggatagcgcctgctctccatcagggttttgatttagaaaagtcctgagtaatttattactataagaaagtgcagcgctaaatagtgtctagaaagaaatcacacattagctagaagagtgtggagaatgttgtctctgagttgcatttgttatcacagattgggagtcatattggttactatcaagatagggcaatcgactcaacctttctaagctctattctagggagagaacgaatatcctgcaggctgcaagacatttgggtgctcagggttggggacccgcagagagaaatttggagtaacaaatgttagggtgctggaatggaatttccaaattgctgagcccaagccccaggtgtcttccctgagacaagtgagtggagtgttaactgtccagtgggatggtagcaactgtgccataagtgacggcagaagtaagtcacacatacctcagtggcagcgtcgctgagaggcgggaaagcacctcctactcttccctgttctggttttcagaattccctctccttcaggtgagggtcagggatgctaagactgcttctagacatcccaaagcctcggcgtaggtggatctcactagaagactccacacttcttcggccttcttcctacccattacacaccttcttggagacgattttcaaattgattcatccgatgaacaaacccatgcagaccctgagcagtctgtgactaaacattgcaatgaggcctgcctccactattgcacgtgagcattttaggatccagatggaaggacctactcaggaagggagaagtgtcttgctgtgtagccctagacggagctctggtgagagaccatgcagtcatgaggatggataagtaaattatttcaagacaaatgaccgtaatgaccacaggctaccaagggtagtggactgagagagagagagagagagagagagagagagagagagagagagagagagagagtaacctttttttttatttgcttcaaatccctgagattcttgaaggaagaaacacatcttaactccacatgaagcgagtattcattgcacgagcaggtattgatcaacactaccaacagtggtgaggaagaaatgtccttccccaagccgctcacacatctgtattcctcgtggtgcctctgtgttctctgagtaaccctaccgtctatgtatctgatgctggatctttccttttgctttacctgttcagcctctggttttttcatgtctctgtgttttattttatcacatatatttttgttatccacttgtaaaataaggcaatgtgagttgctcttggcggtaggacagcacaagccacttgcctggccatatttcaagtctttgtaaagaacatgtgcaatagtgtatcggatcacttcctgtccactggctctaaatggtcttttcctgcttcccgtctttgtaacattatgtcaaaataagagatcatctggatgtcagtgtggtatggaacttgcccttgaaggtccctgtatccaggacatattttctacacttgatacctttggaaatttctgctgaagtcttttgacaatgaattgaacttgaattctgcaaatgtgtttgagctttgactttctcagtatttgtaaatagggttgaaaaacattgcccctcctgagagaggaacacatcaattccgtgaaaaactggggcacacacacattaggagacctggacccagaatccctggggcaggaaaacaggtaaatcagagcccagtttgtgcccagtgttggccacgctgccctgtcactggggttgggaggcagctgaagccaggtgggcgaggagcagagcggctgtgagctctctgaggtggccagatggcagggagcagcctgccgggcatggtaatggccaaccgaggcatgggcactttttgctggaatttgctttctgttaccagggcgccaggtgacatgggtcatcttccgcttcaagccaagttacaggacaacaggagaaatcaccacctggccgagacacctcggtgaacagctcgcacacggctgagccgtgagttcatcctcagagaacaaaactctagcttgtctgatttgaaagggctcctactgtctagacctgcgcaggccttcaagggatgaacctgaagtcagtgtatttgctgagctttgcagctgaccccaagggctctcatgctggctctgcagaccgtgactccattccagcccacactggctctcggccctctccccacccacccattgtcttgtgtgccgcttacttgtggaaggctggtatccaaagattttgtaggcattgaacaaagagactttatcaaaaagtcattttatgtaaaagaaacgagaaagtaggattctggcttggagggaagtacttagtgataagcacgccaccagcacaggcaagccctccatggaatgccctatgtcgctgtaagaacccagctaaatggcccttcaagactaaagactgccagatctctcactgtttctccagggcctctacacagccacagagtcagaactgaagaggaccttctggtaactaaagtttactcctcttccactggggacagaaggctcattgtgagtgacaggtgtttgtgatggctgctctacccacactttttattaacactcattaacatttgtattcatttaggggcaaaccatggcagaataaaagagtgagcaggtccctgtaagggcaattctgcatctcatttgtcctaaactccaagctggaggcaacaaagcttcaacagcaacagtgggagggttgactctgggtaaacggctggttctccaccctctgatatcaattcctggctgtccacaggctcagcttcagacacatgggggttaactgttaatgtgggggccaaggtaaagaaccttaagggtgttcatcaatccagaaacaacactaacaaggagaacaactggggatcccttgtgtatcctagaatcaagggctattgcaaagacaaaggaggggaccctgaaggcaagtgcaaggatagaaagagtcttccaaggagggccaggtgcccagggcatccatataagctaggaatgaagtgtgtgtacacccctgagtgtccttgtttgtacactacagagagaaaaaggttctaactccagggagggggccctgaatgagagagatgggcagggtagctctactcacaaagactgagtgtcaagaaagggcagctgagatctggggttggagaatgatgtctgctgggcagctctgggtggagcctagattcttgccctgggtcatgccaatggttacctaaagaagcctagcaggttgtggtgcatccaaagggcagagaaagggccacaggcaagagaggagaacgtgttaggtcagattcacgtctctcccctggcctcacctctattgccagcttactcttctcttctagaccttgctgaggtgacttctctccaccaaactgccacagatgctgtgttagcctggctctcggtcgtgtgggagtgaagatgacccgcagttcaatgtggccctcaggccaaagtggacccaggccatgcttctctatgttaatgtcttttcccaccacagagcccgctcataaaaacatggctggaacattggcagggctgggttaggcaagggctttgcattttcagccagtacccaggaaaagctgggttgctggttggaggacctcactggaaaaatggagaactgaacaatgtttttgggtcctcctgagttagaggctggatgctgtctttcatccagtgtcattcttagagataagaatactccccatcccccggcatttctgatagcttgtagctctagaaggtttgctcatgagaaaggacatggcaggtcaagccagagccactagctcagagctgaggccagatggttcccaggaggtcctgagggctttggggatgacaggacatagactcaggggtggggttagccaaggcaaatcctacactgaggggtgacatcgatgtccctcatctcatccttgtgtctctgctcccctgcctccagagcctccccagctttttccctttgtctgtggaaatcctttttcctataaataattcctcaagatttctaagggcaaaatcatcacagaaaggaagttggggtagtgtcaaataaagtctgaacactgtgaacttagtacatctgaggagacccttataggcttgtgagccactacctaaactgagggatggatgcaccctgtctctgcagaggccatgatcctggagcttagaggtggggctttgtctggtgggattgtagagcaaacactgggctggcaggaagaacacctttttaccttctaggttcccattctcagcctgcaaagtgaatagtttggtctaagtacaggactcttaagagaatcattttttttttctttttgagacagtttaatgtggaccatgttggccttgagctcactatgtagctgaggatgaccttgaactccttatcttaccgcttctacttcctggctgctgaagctatagacaggtacccactaccatacctaggtttatgcagtggtggggactgaacctagaacttcatgcacgccaggcaagcactctgaactgtatcctttaattcttaaggccagtatgacatcccatcatgatgaaccagaagaactcaggatgctagaccaagatgccatctagacagcaacccccattcaaatggaccacagaggaactggagctttagagatcaaagccactagtccgttatagttgttttcaaagctgaggggaggagagcagactctaacccgcctaggaaggaccggtttctctgtgtagccccagcatgacctcaggccaaggccagcctgtgaaagttgatatctgagaagcaaagcttgagacttccccatcctttcccagggaacagaacggaggtgccgttcccgagaaagcacacccgaacagacactagcctctgccagctgctcctgcagttacatttaaattcacttaagactaatttctcacacttgataaaagccgttgtctctccaagttattcccacattctcctactccaaacacggtatgaaaagcatgatggcccaatgagggggatcttccattctgaatccctgtggcccttcagccttctccaccccttgcttggggcggcttctggcttctgcagttttcggttgggagctgagaatgtggcacagccctattagcataagattcggtgactcactgactcacagattgtagatcagactaacattgggctttaattaattatattaattttaggggaaaacaacaaaactggagagtctgtggcgcttcatttactgagaagctccgaaatgtcttttatttttaaccactgccataaaaacatcttcagtgaaataatgtaaaaatcaaggaagggcctattactcagcgtgatcacgccctttaaaaggctttgacattttctttatttttctaagggttttttttgaggataaaaaaatatatgtatatgagctattacatacacatccatgcatgacacacaccacaccagatcttccctgtgatgctgggctctgccagctctgattccagtcaggtgttcccctctcagagcctcacaaagagagattaattactgaattatcataaagaacttgcatttagttagcttcgtctccaagaatgttccatggttcttaaacacttgctacggaacagacatgtgcaatccacttttatttcttggttgtttgtggttacttgtttttctccaactaacatctagtagtgcctgccctgtgcctggtactgtgtacatgctggggatgtgaagatgaacctgggatcagtacaccacaggctaggaggggaaggaaacggggtttcacatggtttatggagtgatagaatgttggggtgcaaggatagagtgactacgagactcaggaaataggggcgtgacatgaaggagagctgccagagaggactggagggactatttctggcctagtgagggccagatattgactgtgttttgggagaaaccatcagtaaacaaggtagatacagtcacagtgctggagtttacaatctagcagaggggtgactattgacaaaaagaacaggagttacattgctattgtcattagaactattaagggatacaaatgttttctttttcctttgttactgttgtctgttggctttggctgtcaaagattgaacccaaggctttgtacatggtagtcaagggatctgccactgagctacacctctagccttcctttaaaattttatcatttgatatgggtctgattaagttaacccttgaacttcctgcattgtcctaaaaggtagctaggattacaggcctgtgccgtcagacccagcccaggttcttggatattatattactggaatgctaaccaacatgctgaaagaaaggccagacttccctgggacagggaccagtgaacagggacctcatgggcaaacaagaaggatgcactaggcagagagcagggggaaagtgcattccaggcagaaggaacagatatgcaaagtatgaacaggagaggaagcctggagtttctagaagctgattgtctcagggtttctattgctgtgaagagacaccatgaccatgacaattcttataaaggaaacatttaattagggtggctcacttactatttaagagattcagtccattatcgtcatggtggggaacatggcagcatgcaggcagacatggtgctggagctgagagtcctacatcttgcaggcaacaggaagttgactgagacactggctgtatcctgaacataggaaacctcaaagctcccccccccacagtgacacacttcctcctacaaggccgtcccattccaacaaagccacacctcctaatagtgccactccccatgagattatgggggacaattacattcaaactatcacactgataataccccacactggagcacaggaaagcaggtaaagccaccttgggaccagagctggacagttggcaatacaagagtttatatgctttaggcttcagttaacacatgtgtgtgcacgtacacacacacacacacacacacacacacacacacacacacacaccccacagagacgggggttggggggggagagggagagatggagattgtggaaatcctaaaactcaagataccacaaagagataacacctctcaggttggcaagaatgtaaatttgccgacacaggttgccaaaggcagttggtaacattgcataaagctatgctagaacttctcgtgagctgctgctgagggcaggaagtaagccgacacagttgctttggaagacaattgggtgttgcccacagtgctttaagatgcatctgttagtcagcccgtcccctactccatcctagagaaacccatgcgtgtgttccaggacctatgtaccaggcagaattgtttataatgactgaaaacaaaggcaaaatgtccttctacaagaaagagtaaacgtaattttaattttatttgtaaatacacttgaaagcattaattagtacatagtaattacacttatttatggagaacactgtgatgtttcattacatgtatggtacgttgattgttagacatgagcaactggtgtacccacacctcagaatagtcacaattctctctactagcttttttcaaagaatccagttaacggttatcaatcataattatccttcatgataagttattcattctacccaatggttcctaggcatccattcatggtcctctctccaactctgcctgccccaaacccttcacagcctctggtgatgaccattctgttacttgcttctttgagggcatatagtatttatctttccatgtctgtcttatttcacgtaacatggtgtcctacaactcccatctatgttgccaaaggtgacaatgtttgttttgtaatgtccaaataatactccattgtgtgtctgtagataagcattttctttatataagtttggcatttgtgcaaaggaagaccaattatcaaaaaaaaaaatgcagccttttgcagcagggtggaacagcagatctaagaatacatgcaaggggctgtagcatgataaataaaagacccagagactggtattggggttcaagcttcaagctgaagatcagagaaacctctacccagctgaaatggtaattctgcctccacaaatcctcagaggcaaaaggctctgaattcctgtctcttcctccttatctgccttcctccacccagccatatcattcctgtctccatctccctagtgctgggattaaaggcgtgtgatcccaagtgctgagatcacctttgtgtgagctgtttcttttagggctggatcaatttcacgtagtcagtgtggccttgaactaacagacatccatttacctcttaatcctgagtcccggggttgaaggtatgtactaccaccacttagctctatggctgctggcattaaagatgtgtattacaactgcttgttatctatagcttgaggctggctttgctttctaaattcccagtcaagcttttataaataatgtatcaccacaaggggctgaagagatgactcagttagtacccacatgactgctaacaaccatgtgtaactccagtcccagaggatctgactcttctggcctcttcaggcacatgcatgagttgtgccatgatgcacagacatacatgcaggcaaaacatccatatacataaattaaaaacactcaaaaatacatgcaatacgggttctattcacgttcctcctatttctgcctcttcagaatatcctagcctggctagatgggttgtggtccctaagcaataactactagtagtattctgttgaaagagcattatagtggaataattaattacttactggcatagattagtgcatctcttaagcctcatcaaaggagcgtcttgtagtagaccacacaacacagagacccactactggtcaagggcagagaatgagactttgaagtgctcagcccaaaatgaacatcctcccctcaaggctccagggatcactaaagaagaggaagcagggagattgtaagagctctgcctcttatgatgctctgggtggtggttcatgccacaaggaaagtgttttctggacacaaccgggtagttacatatatgatcccacagcaattgtgacagcatgcaaggaccggtgagatctcactccaagcaaaatctagcacagaggagtgggcacacagtctcatcattagctgaggagccattgacaattatggctgctgggcgaggaagagttagttttctttaaggatgtggcccctggtaggtcaaccacttcccagggcgggccccacccccaagagtccttgggcaacacaaatggtttaaaaggtagacgacacgaagccggtgggtgtggaggtgctgagcatctgggaagagctgtgtgtgtgtgtgtgtgtgtgtgtgtgtgtgtgtgtgtgtgtgtggttaaaatacattgcatgaaattctcaaagaattcataatgttctctaaaaagattactcttactatgcagtgtatacgtactttaacttttctttttgtctgaatagcatttttctatgtcttaaaaacaaaaccctgcagtataatttgagtcatcctaaagatttctggtcttttgtagttattcttcctcttacatctttataagaaggacgaggccccattgttagtgagtgtgaggaatgcacttcccatggccacaaaatgctttcaggtatcctgattatttttagtgctttcttactccaggctgctgtcccaggctgggttactactacccttgccataaagctgctgcaaccaggtagcgtcactgccaagaacaggtgctccctgctaccctcttcagactagggacttaacagttaccaaacttgtgatcatgcaacccaccagtgaactacatttgaatatgcacaaatatataaatatttgcctatttataacttttatacatgtgctagtattattatgaagtattttaagggaacgttaagtccataattgaaaaatgttggcaagggcatagtggtacatgcctttaatcccagcactcaggagccaggcagacttgtgagtttgaggccagccagggatacatagtgagaccttgtcacaaatgaacaattcaaaacaacaacaaaaatgctaaaattcttggcacctttgccaaatttgattaatgattgctattttttcccttgagatgtgtttgctaaagagccattctcttgggattcagtttgtttgaactgttaactttaactttcattgtctttgtgggactcttttaaaaatcatttgtccaaatttagggcaagtttagtgaaaagaaaagcacataacggatgcagttattcagctgttgatgtataaatgacagcatatcatcaaagaccagaagaaatgactaccatttataacagatatctgtaaacacgtttctaactgagtgtacatgacatcaccccctcctgggtgttgggaacccaggcaaatgctatctaggagactgtgaagctaggtctctcatgacgttgactgtatcatccaagggtgtcatcatcagaaggcctgttggggggtagtagtaaggagagggtgtcatattcttccatacccactcatgtggtagctggcaagccttgttcccagtctagcacagactcaactatcatcctatgtgccactcccaggcaaacaattcaagatgagtaagagagagatcccaatgcacaagttacagttgactacaggagtaagtctttggccagagacatcatgggcacatgatctatgttgtcatatggggctgtctctttctgaaaaggctctcccccctcatttaatgctccatggtatggtcctgacacttttcagtcactgttcaataagagattacacattttccttttgttgttgttgttggtggtggatccggtttttggagacagggtttctctgtgcagctttgtagaccaggttggccacgaactcccagagatctgcctgcctctgcctccggagtactgggattaaaggcgtgcgccatcacttgagactgatcttaaacatttaccagcctacacctggacctcatcctgttttagataaagtgaggaagttacatgggactggtctctacagggacgaaaggccactcatgcagcaaaatcctgagccctcaaaactcatggtttgtggattccttagagttctctgtccaccttataatgaaccttgctgagatcccccttggcaaccatgagcccctcctattctgcttattggtcagaggcggaccaatcagattctgtgttttaaaatggaaattagaatgtactaaattctttttcaaggtgataaaaagaggatgtgtttttctcttctcacttcaaagagcttaataaaatgtaaaggactaaatatataagtatggaagctatcatcaggaggcagaggttttcaaccaatacctggcatttaaagagagcctagaaggctgcttcctctctgtgtccatctcctggaaggcatctcagaagagacaaagttgtgcgcagcctaaagagaactgggactcctaaagtgagcaacactaccaccacttgtctctctgctccttatcataagtatttccagccctgaatctggtgctgcagcaagctacttcttcctccgcttgttttgaagtgaaacctgtcacttaacaatgctcagggcacagtagagatggctcagaggttaagggtgcatcctgctcttctagaggacccaagttcagttcccagcgcccatgctgggtggctcacctgtaactctagcttcaggagatcctatgatcttttctgggtcccgtgggcacctgcatacacatgcatatacccacatacagacatatacatgtaaacacaaataaataataaaaataaaaagcctaagtgttcaattctacaacatgtcttttgtaaatgagcaggagaatatacatatacatgccatagcaggtctgtacacgtacacgaggggaaagacactcagttaaaccatgaacaaatccaatacatcttccacctttgattagaaataaagctgatcagatgtcagaattcaatgaatagaatgaaacccaataaactgaacctgggggaaaagggagagaattgaaggtatacaatgggaagttgaagattaaataaataacaacacggaccccagcttagtgtcataaatgagaggtgggaaacatcacattcacagaacaagaacgggatgctttgagaaaggaacaaaaaccaccagttacccagggggccacgagaaggagctcaggggtgtcttttgtccaggttcgtcttttgtttttccttatcagaatgaaactctaatttggggtggccattctctcagagtggaatggaatggggaaactcgattaaaactcgattaggagttaggtttcccctccccttctccgagtggaaggggccagagagaaagccaacctccagagaagagtagagcgaacagggaacagagaaaaacaaacagaacaagcgcacagtctggactcttgacaactttccagttcctatttgtgctcttggagaggccccactgcctgtgggtcctgtgagatgacccagtaactttttaataaattctcctcttggttcaaaattaggtcaagttggttttcattagaagacaaaaaacagtcttcgaataagacaaaggagctgacggactggaaggtggtcaagtctcgagtcccttagggtcccatgataccgggtggagggtcggaagcagagctgattccggtgaggaccccgtgcccttgttcctgcgcttaacttttcctaagtattgcactgacattcagattgcgaatttggacagcagatgccccacatgccgtgttttccgcatttacatttattttcttagcatcttgaaagaaagatggggctgagcctgccaagtctctaagcaccttataataacctattcagactcatatggaaggatgaatttagccctttcacacatcagtacagtagcaaacagactgactcacctcttcatggaccttggaaatttgaactaagaccgtggatttacccgacaataatgcattacgttgttttaatccttaaagccataaacaaccccccacccccaaaccattctagcaatttgaatgggagaccatcacttctgcttctggtcctttgccctgtccccaacatccctttggatggcaccgaagacccaaagataaggcaccctggatggtctgtatggtgtgagtccagacaaacacagtttcagtggggaagggaaggaaagcacatggaggaccccccagtgcaagatgcagttgctagagggaggggactttccttatctccaaattggctgcgctttttccaagagtaggggcattcatttttctttgttgatttttgtctttttatttgtttgtattccaggctgggacaagtggccttctcaacccagccatagtccatgaattggtgtttaacccaaatcccattgaaggctgcgggaaagaggagaggaaacatcccacacccaagtggccagcgccatgaacaaaggggagttctcgcggtgccagctcttggctttagctgggcccagcgggaatctgaagtccccgtgccagggtgagggcagccaccgaagcagatgccgggcagctgagaggagcgattggtttcagagactccaattccttgtggtgggcaccttccttctcttggtgggagagtggaggtggctgggggctgtgctgtccaccgctggctgccagctcttctcggtttgggagagctgtcaccggtctctggcttcaagcgggtttgttaggaagcaacactgcctatttatgaagatttatggagaagccgacagacattaggctctgacgcagacctcaggtgagcgctctccccgaggtggagggctcaggaatgatggagagtgatttactctcccctctggctccgtcaatattccagccctgggcctggcccaggaggagaagtgaggctgaggcctggctttctggcggtgttcattcttcttcggagagaaagagagagactggcactttttgtggcatctctcacggagggggaaggccaagataaatggatagtttcaaggtcattagcttcctgagctcaccggttgcttccctctgccagagggctgcttggagaggttacggatgctttgtggctggaccaggagagcccacatttggatcaggggccctgggacctgctgccagtagagaacccgggactctgggcctgtagagtatgtattctctctcacacaagtctgctctgagagagcttgagccctcgggtaaggagcctgcttctcatggaaatctccagaacctgtgtcaatacaacactgacatttggtctttctcatcgaagatgaaaaaatataagtgagaaatgaagatgactagagtggacctgaaaagcaggacaaaggtcaggagatgggggcactaggaaacccattcttactccactctggatcttccacgagttcttggattataccacatccactcttctccttcataagttcttagatgcttgatagggaagtgacatggagttaaagctgcatctatttatagctctccaagtttatctccattccctgaacttgtgcttctttgcacttctatgtattttgacaccagtaagcacctaccaccccatgctgcttttggttaaccaatgtgatttatgcatatgttttcatattagtggagaacacgttacttgtttttctagcgttgggggtggaactcaggacttgcacttgacaggcaggcactccactatgtagctgcagccacagcctccaacattcttgcctcttggttgactaaatcactctagtaaggtcataatgggcgtggtcattccactactcctggctatctgggttaaatatccacacctctacatttgtcctgcgattttgtcactgtctgcattcctagaccagaacagtgtacttatgacagtgtaggatgcctgtcattgtcacctagactccatagtttatagtagagctcttcagtcttggcattgtgtgtgttctgtgggtttagacggatgtctccatcattaaagtaccttacgaagtgttttcactgtctgaaaaaaatgtgtttgggttatttatatatatttctaactgcattcccagatgttaaaaaattcacctttgtgtggcagtctttgattctctctctcctcctcctccctcataccttccctctcatggatggaattcagggcatcaaacatgctaagcaagcagtccaccttagaccagaaccacatcttcagcctttctaatctgtacctttaagaagttcaattatcttttccaaaaacatatctttcatagtccttgctacctgtaccagttggttctctagggactcgaaagcaaactgatgtgtagaattggtagaaggtaccaatgagagatgaggcgttctctctgtctctcattgcagtcaccttggctgtgtattgtcccttatttattttcacaaaggctgccctttccacctcttgtttttctacctgcccctttccccacagcaatttcccatctgccttcacgtacaccttgcttcctctcctcaccacttgtggtctaggggagcatccagcccactgtgtgcttggcaaatgaccgcccccacacacctgccgcccagtagaatggcccagaagggagcttgccaccggccagttaaacaagcatttctgaggcttggcctccagacacagcatttccgggcaggaaggcctgcttactgctgttgcgtgctgagacctgggtgtactccaacctcaccttcaggattcccttagtgggctgctgggaatagaaggggaagctgtgactatcgtccagcctgtccacctggcttggcattatgggtatgaaaaggcaaggaagtgagactgcatgacttccaaagggacctggcatagaaagccctgaaaatggttgcctttctctaccccaaggactcaggcactcgctttcaccatgaccaagagggatatatgttcccacacattctgcaggactgataaatgtaccagggtagtttttcttgggtgagggatagagctgaggggctggagagcatgctcagaccagagcttttcttcttcctgggctggctgattacaaaaggtgttatgaagcatgtccatgaagaactgcacaaagtgagccatggcagaagaggtagagagtgctcaggcccactccagggacactcccctctgacagctccacattcaccagagagtcgtgccatgtggagacattccaggatcctagaccccagagacccagtatctatctcttaaggacttcctcatttggggattttactgacagcagacactgataaaatcaaaagcaaagtgaagtaaataacatccctggaaacagtgtccctagagttctggggacctgttggtgcctctgtgccacctaagtctgtctctgtgggtttgtgacattcataaatgtattacctgagtaagttcacttgaggtgttaacgaaacagtagttgccacttctagtttaaaagatctgacaagtttcatctggagcatatcctgtcacctttctcgatggtgacatctcctccatgccccaggagggcagatggcagaaatggcttcgataaatggtgttgaacaaatgaatatgccatgatgcgcttatcattaccacttcagtgatgaggagaccttgttcaagggagagcttgcagaggatgggggtgatgagacatgtgtacttcttggaaacctggatcagagtgcggcctcctgtcccctggctgggctctttcttttttctcttccttacaaagtagcaccacctaaattctgctcttttccttaggactatgagagtctgctttctgttgttataactgaataacacaggttggaaggcttataaagaataaaagttgattcaggttataaggccgtgcttgggaaagggttcatggacctgcttctctcactgcaaggttaagacagggtgagcttgttgacttgggtgctcgtcccttttatctctcacaaagccacattgccaccataggccccaccctcaccctcatgacctccatcacgtgtaatgttggggattaatactcaacatgacgtctctcatcgaggaaacgtcttttttttgttgttgctttttttttttttttttttttttttttttttttttttttttttttttttttacaatagatgaagactttaaaggaagccacaagccttaaaatgcagttgtagaactcagtctcaacccctgctcccagtacttaggggtcatttcagaaaagggggcagaaagattgtaggagccagaggaacaggaagtttgctacgaggctgggtttcttagaaatgtcagagaagctacaccatgagactgtgcttggagaaggctttcttgtttatagccttcttgtgtcgttacaccatgagacctcactaatatggctgcctaaatgtgagccgaacaaggataccaccagtagacacgctaatgtggaagctcacaaggcctcaaccctacacaaaaatctacaggtggctaaggactgctgagagcaggagacattgtcttccgcatgactgggcacaccaattggttactcaataccaaacagtcagtcctggaaagatggacagacaagcaactgtatatggattaagcaggttgcactcatacatttaagaatacacacacacacacacacacacacacaccaccaacaacaacaattaaagaaaatgaggctatgaatttgtgagagagcaagggagggattggagcaataaaggggaaaataatgtaattacattataatctcagaaaaaaataattaaaaatctcaaacatgagtttagaaggctctaagtctgtgactttagcaagaaccaaatttgagatatcatgttaaagcaacatgaggaacttttttaccctccctacggcaaccaccagcctgtagcaggtgtggattctgagatcccttccagaagagctattctccccaaaagaacagacacgtgttgtaggatattattttaagatatgctacatttgtttatgctgtggaacatttgttcaatgaggcaaagatgtgttgcattcttttatgttgcttttatttaactctgtgaagctgtgttactttgcctgcctaaaacaccggattggtctaaaaaagaactgaattgccagtagaaaattaggagaaaggataggcaggactgccaggaagagggaataattaggaggagaaatctgagaagaaaaaaatgagaagcaaaaggagaaagagaggaggactcttgtggccagccatccagatacactgcaagccacagagtaagaaggaaagaaagggtatgagaaatagaaaaaggcaaagggtagatgggataatttaagaaaagctggctagaaacaagccaagctaaggccaggcattcataagtgagaacaagactctgatttatttgggagctgggttgtgggcttcaaagagcaaagagccagagtttaaaaaaagcgatcctgacaaaagacacatcacctgctcccgacagtatcctatcacttggcctttgcatagcgtcttgctgttcatagagcattctcatggatgtgacctcatttggttcctctgataacttcatagctgcagatatcactattgcatttgcctctccctgaccacacagctagtgagagacagagccaagaacagccatctagtatttcctctaagtgattaacatcaaggatggaggcaaggtcctggagaaagccggtggaaagccggtgggatcttacagtcctacattgctgaaacattgtgtcacttgagtgtgactcatctgtagcaggaactttaactcctgattttctcagaagagaggagcaacagaaggctggggggtgtggctgagtgatagagcacctgcctggaaggctcaaggccctgggttccatccctggcaccttaataaaaacattctgaaatacaaccacaaccctagccaacaatcagtacttactgagcatactcagcaatgcacctgtggcttggctctgtggagtttgtccaggttgctgaggggtgggttctacaaagctacagaaccacacacaaccttcctcagagtccagaaatggtcctgatactgtggtcatcttctttagccaaaggaatggggttgctcatttgagtttccttgaccttgctcactgtgtgctgggagatgaacaccacactcccaatgtcaaggagggatggggactagagagagctacttggtgaagcgacttggctatgatagctgaaggtaagttggcagggctcagcatggcctgggctgctgtgctgcatgactgcttctggcagtggcccaggctctgagcagggattggtgcctactttgtggccttggacaattggtctgcttttgtagaaatctgtgtcctttttcaaaatcttctctgctcaaggtgtgctcactgttctataggcaggatgaaactgaatgttccaggggctctgtttcccaacacccaattaacttactgatccattaacccacccacgaatcagtgggggattactcgtgtgcccaggactcacccctgactggaaagctctgcttgtagcaggctctgcaaatacagaacacacatccccctcaaggagtggaagagtcacctaggtcaaaggcaaacacagcaaagaataaaaaagcaaggttcaaaaaagcagctgtacgccaaagacaaagaaggctgcctgggcctgtgggtatctgtggataaagcccaaactcataaacttaatgagatgatttttaaagctttttgttagcacataaggcattagatatctttgtaatgtttttgaacaagagattttgtgtgtgtgggggggtgcatgtgttggtaagccaattgtgcaattctcaaacacaaactttgtagatgactacaccacattgaaccgtcagaaggttagatgcctggaactttagagtgtctctcaaaggacatgtgtaaaggctttggttacaagcctttgtctctgttgagatctttaggatttggaaggaagttgttaggctattgggacatggatatggagacttttgctccttcctgtcttttaggttcctggaatccgaggtgagcaggtcatctctgtcacacactcccactacaaggtactgtgtgccctcacagccccaaagtcacagagcccagcaacaatggttctgaagccaaaatcaaaataaaccttaccccctgtcttaggggttctattgctgtgaagagacaccatgaccatgacaacgcttataaaggaaaacatgtaatcgaggctggctttcagttcataggtttagttcattattgtcatggcgggaatcatggcagcatgcatacaaacatggtgccggagaggtagctgagatttctacatctggatctgcagacagcagaaagtgagccactaggcctggcttgaactcctgaaacctcaaagcctccaacccccagtgacacacttcctccaacaaggtcacacctccaataatgccacgcccatgcgtctatggggactattttcattcagaccatcacactccctgtgacttggtcaatgcaggcattttctcacagtgatgcaataacaactagcacaatgtcccatgaggtgaccacccttatactttgtgtcttcagagaggtgacaagtgctacaaactggattggggttttgcttccccagatagcctaggggcatcctctggaggcttttctggctttctcagtccacctaaggacctcataaagtaaggaagaatggctccttagctcagtaaggacacacaggagcgtgacaagtgtgggagggggagcttccttagaagagcctctgcagtgggggcgctgctgctagggttaactatatcacagacattttatgtcagtcacctgcaattttggaacaagcctgcatggtggacaccatcgtctctactctgctcacacagcagcatgaaacccaaagaggctaaagaacccacagctggcctcacagctggacacctggtaagtgtttgaactcactatcaaagattctccaaaaatagataggaagggaagtcatggccagctgttgctcttgacaccgtattcctggatgccccaggacctggggaaaatgactcaccagagctattctgtagagggattcagaaggaaaggcagtgtcaaggatctgcttgcaggactctggtttttgtccaagtatttgtggggagctcatggagaagcgaagctttgcactaaattcctaggtggggagtgacttgggcctgtgcacagcctgcactgcacagggactcaagtgactaatcactcacggggtcagaacctaaagaaaggtgatggaaacagggcggggacctgctggagagtcattgcctctgatggaaggggctttggaatagaggtgaggcatgtcctaatgaggctataaattgggagggcttattattaactgtctagagaggaggaggcagcaggacaggtctcactcatagataactgaatttttgtcttgaggaaaaacttcagaaacctgtaggctgccttttttgttttacagatgaggaaacagggagagaaagaaggaggtagaagaggaggaggaaaatgagaaagagggggagtaggagcaggagctgggaggagcaggaggaggagcaggagcagttggaggaggagctggagaagaaggagcaactggaggaagatgaggaggagcagctggaggaggaggagctggggaggagcatctagaggaggagtgggaggaggagtagctggaggagaaggaaggagctggaggaagaggaagagcaggaggaagagaagctggagaagaaggagcaactggaggaagatgaggaggagcagttggaggagcaggatctgggggaggagcagctggaggagctgctggaggagcaggaagaatgggagtgggcacagctggaggaagagctggaggagaaggaatccaatgcatccagagccatgaggtaattagagatggagctgcgtcttggctgccttttccttcctatcaggagctattcccaccatgtggtactcacgtggtactgacagaggtcagcaaactcttgtataaaggccagattgactcagtgggccacacagcctgttgtaacccaccaaagccactgacagcacacaaacaagtgcgcgtggctctgttccagtaaaattgtacttactaaagcaagtggcagcccacattggtccccaagccatggtttgttgactcatgtcttgatatttttctttcaaaaccacctctgattagagccagtgattggtgatttggaaaacagcactttatcctcccaacaccagtacacctgagcaaccaaggctctgggctgtgcctttcagagagcggacagaagtagaatggcaacaatgcaaaatagaacagaaagaaatcacccaaagaggaatgtgagaggagagaacgggagtggggggtggggtgggcagaaacaagctaaataacccttcccagcacaagaacactccccatgctggctggtgatagcctccaggacagtacagtgggtaaaagtgctggccactaaccctgatgccctccctaagttcaatcctgagacccacatggaaaaagagaatgggcacagtaccaggagtgcacacatgtgtacacacacacacatacacacacacacacacacacacacacacacacacacacacacacacaaacacacacagtaaatatgtgaatgtgatattttttctctcagatttttaaaatttaaattagaagcaagcttgttttatatgtcaatctcagttccctctctctcccctcctcccctgtcccccatcaccccctatcccatcccctttctgctccccagggagggtgaggtcttccatgggggattttttttcaaagtctaccatatcatttggagcagggcctaggccctcccctgtgtgtctaggctcaaggagtatccctctatgtggggtgggttcccaaaatccatttgtatactagggataagtactaatccatcccagagccccatagattgcccaggcctcctaactgacaccaacggtcagggggtctgggttggtcctatgctggtttctcagctatctgtctggggtccatgagttcccacttgttcaggtcagctgtttctgtgggtttctccagcctgttcttagcccttttgctcatcactcctccctctctgcaactggattccaggagttcagttcagtgtttctgtggtgtctgcttctgcttccatcagccaccagatgaaggctctaggatgacatttaaagtagtcatcaatctcattataggggaagggcatttaaggtagcctctctactattgcttagattgttagttggtgtcattcttgtagatctctggacatttccctagtgccagatttctctttagccctataatggttccctctattatggaatcgcttttcttgctttcctgtatttcccccacccccaactcaaacttcctgctccctcatgtcctcctctcccctcctcttctccccttctcattctcctagctccctctcccctcccccatgctcccaatttgctcaggagatcttgtccctttccccttctctgggggaccatgtatgtgtctcttaaggtcctccttgtttcctagcttttctggcagtgtggattgtaggctggtaaaaaaaacagtggttagatgccaggaagtaggtgggaaagccttaaccatatgcgtgttgttaggcccaagtgcctcttccatccctgtcaacggagtgctaaccttctctcctttcatacaacacatgagtgtgattttttaaaggaatcccctatgaggccccacatcggtggtgcatgccaactttgcagtcaccacagccatcctctccctaattttgatagcatgcaggttatagctgttctgggaactatagtcgatgaccgctgtgcctcccctgccccctcctctgaatctccacctcacccactcaaggggaaatgggcacatttgacctcagttcactgtttagtactgtctggccatgtgtcgactcagcatgagatgtgggcagagacggaaggaggatcagtatgagcccccaaagcccttcactcagacagggcacagcaaaaaaaagctgacttcatgccaggtgtggtagtgctcgtctgtagttctagcactagggaggctgaggtggggcggccatgagtttgaggccagcccgggctcctagtcaatcctgtctcaagacacaaacacaaaaaggaactaaaaagcacttaatacctgtacagatgggtttgcatggttttcatgtttagaattcaaggacctcttcaggagaggtctttaaggcagccactttcttgtaaaggtttactttagatttggattgtgtttatgtgtgtgagcatgtgcacatgagttcaggtgtccccagaggttaccacctcttcccctgggccttccagcccctttcagtacattagaggtgagtggcaacagcaacttgtgagcagacacttttttttttttttaagattttattatgtatacaacattctgtttccatgtatatctgcacaccacaagagggcaccagatctcataacggatggttgtgagccaccatgtggttgctgggaattgaactcggacctctgggaattgaactcggacctctggaagagcagtcagtgctcttaacctctgagccatctatccagccctatcaatatggccttttttttttttttttttttttttttttgagatagggtttctctgtgtagctttggagcctatcctggcactcgctctggagaccaggctgaccttgaactcacagagatctgcctgcctctgcctcccgagtgctgggattaaaggcgtgcaccaccaccgcccagctgagcctgcgtgtaacttagagacaggctcaagacaatttgccagggtcctttcaagagctccgggtggcaggggtaagggactggaggtgtcatttagaaagccccctgaggggcgtggtcagtggtattggtgctgactttctattatttagtaagcttgctcccaggttagcgatctcgaacacctaacactgctgcccaagactctctggcattcagggtatgcatcccccatcttctccctttggggatgtttttgattactcctagaggcaattaaaaatgactgctcatgcccatgatgttatcttaacttaatttggattctgtgccgtggattttgactgctaggaagccgatgccttttcatctaagtagaaagaatatgggaatatttctgccttgcccttcacatttgattgatacttttcactttggaagctaattataactgatgtgaaagaaaaatggaattcagaaatatgggttctctttatgaattttcactctgaaaattcaggtcatctggttagttttcccatacctcagtttactcgtcagctgacaacttgctgtgggtgttagtcatctttctgcgctgtgtcaaaatacctgggaaaataaactttaaaaggagaaaggtttattggtttatgattccagaagtctcagtctgttgtcgcttggccctgtttcccttgggccacagtgaggcatggcggatggtgtctgggaggtggagaggggacacaggaaagagggacggagaatggacagatgcagaaaacagaagtgacctaacactaagccctgcctcccaaaatgtgtctgtccaatagcatggggctggtgacacatggcttttggggacatctcatttctaagccataacccttacctagctatggtgttattctttctgacttccaaacagagcaagctatgggtctgactcactataacccatgtctgtctaacagaatcccagcctgttaaggacctctaaggtcaacctgtctgacccccttactcatagcaggaatgttcatgtcatccctggaaagtggtaggcagtcccaggcgtattcttcctcagactggagacctctgtagtcaaagcattcatttcatctttaaattcacactgttgttgaacattcctcctatctgaggcgtcctccgacgctctctacctatgtgcagaagctctgctctctgaaggagaggaaaacagacggtctctttttgctatcacagccgttcaggtctgaaggctcttttatcggcattttttgtaagttgtttgaggtacatggaagaagagcattttgagaaaggtaaatgtaccattgctttgtggtggttgctcctgctattggtgaattctcagttaaacaaacaaagatgtgttccagtgaatcgggaaacctgtagggtgcacttgttcaatacattaggtttctgagatggaggtaaccccatttcagatttacacatcactacatcctgcctggatgatgattttcctctcatctggagtgtttacacagctaatgaggttgctgcattttaaagactacccaggaagcaagggacctacgagtctgtttaagattcttagtgggatcctttggctctgtttatagatattaacacttgacatcaagagtcaatagtactagttaggaaggatttcttgtagagtaaatctttacctcattcacttgttcaacacatgtttgttgagtggctgttgtatgtcatgaactgttgtagacattcgtgttatgtaagtaacaacaacaaaaacagatgcaagcccctgttcgtgtaatgctgatgttctggaaagggatatttttataatgtgtcatgacattataatacataaattgcattgcaggttaaaagatggcttggttaaggtgtatcttagaggtagagcactttgtctactgtctggggcgaggcctggagctttccccagcaccagaaaaaagttaaaagtaagtaaataggggctcacagacactgaagcagctcacagagccttcatgggtctgccctaggccctctgcacgtgtgccatggctgtgtagctgggtgtttttgtgggactcctaacagtgggagtgggggtgtctctgactcttttgcctgctcttgggacccttttcctcctgggttgcctcgtccactcttgatatgagggtttgtgcctggtcttattgtatcttgttctgtcttgattgatgtccctgggacacctgctcttttctggggggaggctggggatgagagtgggtctgggggagaggggaggaggaatggaaggagggcaagatgtagctgggatgtattgcatgagaaaatagtaaatttaaaaaagaaagaaagcaggatgaacaagctatgaggaacaagccactaagcggcaccctccatggcctctgcatcaactgccctgacttcctttgatgatgaagagtgatatggaagtgtaaaccaatgaaagtaaataagtaaaaggtagaacgctcttaaatttttaaaaagttatgtgtgtgtgtgggtgcatgtgtgtgtgtgtgtgcgtgtgtgtgtgtgtgtgtgtgtgtgtgtgtgtgtgtgcgcgcacgcacgtgcgcgcgctgcgcatacatgcagaggttggaggaggaagctggatctctttctctattgctccatgccttactctcttgagacagtgtctcttactgaatgtggagtttacagatttgggctacactggttggccaacaagcatcagtgatcctcctgcccctgctcccccagtgccggggttactgatgagtgcagccacatctggattgagagagagagagagagagagagagagagagagagagagagagagagagagagagagagagagagagatcaccagaagaggagaaggtgggagtcaagttcatagttaggaatggggcattagaatggcctccaggggaatgtgacagttggacaaagagatgtaccagaaatgaccagtaagtcaggaagaagccaggaggaactaaaaatacaaaatggttgtcttgagtatcttaacagtcataatggaagtcatgaaagggtgcctttattttattgctgttattgctgttcgtattttggaggtttgcttgtttgagacggggtctttctctatagagttggcctggaactcaccaggtactggcctcaaactcaaagcaatcctcttgcctcagtctcttgagtgctgggcttatagacatggatcaccacaacaagccaggaaggttgtctttatttactttatgtgtgtgtgtacatgtgtgtgcatgcatgcacgtgctgtgtgaatgtgcaagccagaagctgatgtgaggtgtcttcctcaaaacattgcctttaaaatgaatgtgatttggtcattgtttcagtttggggatctgatcttggtgtgaatttgggtgagtgatattttggctgggctaggaatagatggtacctgtagggaacagagagagagccacaggtggtgtaggaaactctggaagacggagggatagctagctccagggtcagaatcaccatctaatgagccacctaaggcaggaatcctgtagcagatccaacacagcacctcaccagaacaggaagcaagaaaaggcctgccagcggagccagagacagggaaaaggtcaaaaaagggctctcgcctctgcattttttcctaagggtatgatagttaatgtgtctgtcatagtttgtatctctgtgctattctgagagcaaactgagccagggaggcagcccagggaggtgcccccaccacattgtacaaactgagccaagaaggaagtgcctgcactttcccttagtttctgttgtggttagaaatgtcaggaagtccatgccttgggcctaagtcctaaggaagcaaatatgtgctgttttgcatctgaaaatgtccccacaggcccatgtctcagattcttgtttgcctgctgtcggttgtgctattttaggagatgttgggggctagctgttggaagcaggtctgagaagacgccttggaagactatgtctacacctggttccagcttctctctaattcctggtctgctgggatgtgggagctgcagactcccaccaccatgcactatgcggtgctgtccctcagtccccagcaatggactgagaccttggaaaccatgagccaagatgaagctttccctccttccgttgtcttggtcacggagatgcaacagcatctgactcactcgagtggtagataggacatcacttgccattccaaagcattcaagatgaaggatggagtctttatcagcacagataatcttttcagggactcaaggtctactgagagagagagagctcagctattaggagtatcataggacagctgtctgggcactgacatgagttctgggtgcttaactgtgaggaaattatagaggaccagattgctggtgggacttagttcatagagaggcagaatgggatgagtggaatccctctcacctccacatgtgatgctttttctctcaagggcttgtgatttcagagtccagtcctagacacaggtgtttaggaatctataataatggatgagaattgaaaactttattggcctccaaagaaaacgattaaattgaattaataaaattttaatttgtggaaatggcatcataatgatatagttaattgctaagcttagtacagttgtcctttagtgtccatgggggacctgctccaggaccactcccacatctgaatcagtagacactcccatgctgtacaaaatggagaaatatttgcatataacctgcacaatccccaaataatttaaatcatctctagatgactttaagcactcactgcagtgtgaaagtgatattgaaataattattttactgcattgcttaggggataatgtaaaaaattaaaataaaacccatatgagttcactacagatacactttctcccaagtatttttctatccaacatgggggcagaacctccagatatgggcaactgttaatcaaatgacacatttgaaaccaacggaatctatagttttcttcctttcctacaagaattcctaagcaggcgcaagaactgccagcgagctgctgccaatcaccatttaaactactcatagccaaaacatttcaaaagcaaaaattaccattttaaaatgtacttctgagacaaaaaaaaaagttcttgctagattggacaggagatgtggggttagggtccagaactgagaagttgtcagcaaggttatgacaagcatttgcccaatatgcgcagccaggcaggcaaaggtggaacagcaggtcactgcagagccccaggttaggaaagccttgttgctccagcttcctgtgggcacccctgcccaccccccctgcacaccgtggcctcgttcatttacttcagtaactctttttctggaacaaattctcccctagcaatccctttccagagtactacagtaacaagagatctggaagactttgattgatggggtttgaaacacgctttctttttggcaatatttatatttgatcccttttggactggctgcacataactagagcttatcacattgctggaaattatgggaagactcggaggcacaggaaccctgagcctgccgagccccgagagaacaaagattaataccggtttctgcttctctgccctgacctctggtatctgtaaataacggttggaaagatggggcacatcatgatctatgacatggtgtcggccattccagttgttctgtcttcaggtgtgatttatcattctccacagtgacacaaatcacagacccagcttgacatgctggaatgttggacccactgactgctatagcaatgaacctgtttgcatcccaacactttcagcctgagttagacctagcctcttgcttcaattcagaaatatgctgcagaaacatactttgcaaaccctgtggttttgctgctggcaggagcagcaactcctttccaactcttgagaggaaacaatgagaaggagaatgaaagtgaaataatttaaattgaaatgttttcgtatttattttatgggcttgtaagagatgggttagcagttaaaagctgctctttcagaggatccgagtttcattctagcacacatattgttgggcagctcacactacctgtaactcccgctccacaggatccaatgccttctgctgacaaatgttgttaggtgaaatagctgctctgagacaagtttgtatgagtgtatgtacacatgagtgcaggtgtctgattataccagaagagggcattagacacttcaggactggagttcctggcattttttgggatgttcggcttgttatatgggtgctgggatgtgaactccggtcctcatgatttcccagcaaggtctcttaaccagtgagccagcccaaacaaggtctattgtagatgaaaatttgtcctcacttttcttttttgcctgccttcctttcagcataaatactatgctgagtgactactgaaactagccctattccagctaccttcagaagcactaaatggaagcagggtatcatagttctctgtcttgagacctgaaactcaggcacatgctagttagctctctgtcatatatggagggccagcaggtttctgtaggagagtgcttgcctctgtgcagctatgtatttttccccaaggtagggtaagccatcaaattagaactcttcaatctgctcctcagtgcaagcatcttccctggagtggatgccgacaagaagatgtgaggggttctatgtgaaaacaccctatttatttggacctttttcctttttctgaagggtgatacatgtaacagtatagtgaccttagcaaaaaaaaaaaaaaaaaaaaaaacccggcagtgtatcatttctctttggaatgacctttgtattttaacccaaattattactatttatttaaagaatctagggatctcagatttaaaaacaatttggttattcctccctgctcctttgaggcagagactcactctgcaactgaggttggcctaccaagtgctatatatcccaggctggcttcaactgccccaccctgcctcagtcttgaaagtggtgtgattgcatccatgttccaccacacccagtaatatttgagttgcaaagagtaacatttaaatggtgcctttgaaaggctgcaattgtatactagagcaaaatcttaaaaatcaaaaaaaaaaaatagttctagtagcgtgtttgtttagtcagaaaagcagtgccctcgcctgacagagcagtgaggggaacttctctcctcttggattcccccctctatcagtggtactgcccccacccaagcccagcttgccttacttgatgccctcccagactccttgcttcactcacagattgccccctagttcccagtgcctgtcactgagctgagatgacagatttacccgagatgatatgctgaggcaatatgcatttgagctcacaagtcctggaaccagcccccgtgacactgctgagccctgcggtgacttcgagggcacgagctgaggtaaatgtgaaccctggggaagggagaaagagtggtctaagatactcccatcatctcaccgggcaaggaagacaccgtcccttagcctactttctttttccagtttttagatgtggacttctgagccactctagaaacaatagaaacttccccagcattgtccaaagtgatattcatttgctcatctcagacccagatgagaatcgacaatgaactttcagtgcatagcagcactttgtcatatagagtgggttattaatactaccctggagccttggcaaacaccaccctccgtcacattccacagtctactttttcgtaaacatcttatctcatccaacctaacatagctcttaattctttatataaccatgaaactcaacactccaccttcgttggatgggtcttcttttgcaaacccggtccctctcatacttgctttatattacaacaacattaattgctattttatgcatatccacagacagacatcttcacaacttcttggtaacttacaagtgcactggttgacagcatcctcaattagcagagtcatttccatatcctggacatatacattgatcagaaaagatgacaatttatttttagacagacgcagcctgcataatttaaatatatttcccatttggcaaaaatggtgttgtagctaatgtatgttcaatatttccaaaaacattggtactttcccataaatatcttccatatttttttcagtgagtaataaaaaaggttgaggtgggatgtgttttagcccaccacattatatcactcctatttttcctctttgttggatggcaatcaggggccccgatgccaagctttggaagcaacagcatctggctccttggcagaacccacaggcagacttgttgccagcctctaagctgtgtctgggtctgttgcagggtttggctgcagatggacgctctgggttgcctcgtgcttctggaagccagtcctggctttcctttgaatctgaggactttactcatttttattcatttgtgaagaagggaccatccaaatgttttatgaaaccaacacaggagaacattaatggatcaaattttgcctttgaagaggcagaggtcagtgtgcgtttgggcaggagacacgacatgccggggacaagtctgcgcgtgggtgagcttcgtcccgtgagcttctttctattccagagggctctgaaggagggtggatttgtattcctgtctctccctccctcaggatgaggctgtgtgcttactggaaaaacagaaacagtgagaactcagccatcttcggacggaaaaagccccttgtttcttttgtctttttagtggaaccagaccatgaggacacaagggccagagggaggcccttcccatgcctctccctgtgctgtgttactgctcacctgagtgtggaactacactctgacaagaaagaagcacattaagtcttaatttagcctgaactaagcacatacgttgaagccagattacttctactagctttgccaagactgtggcctctagggcaagacttccctgttttcttagaattttgaaatgccaccttcagctcagtagggcagtatgctcctgtgataccagggatcgggaagcagaagaacaattgtgagttcaaggccagcccaggcaacacagcaccctagactccatctcataaaacaacaacaaaacaaagacatctcaaatcatagcaacccaacaacaaatgaaaaacccctgttaccactcatgctatttaccactcagatccactaaaaaagattctccaagactgggggcttgaccaagagttaagaacattagctgctcttgcagaggacctaggttcaattcccagcacttacaaggtagctcacaaccatctgtaactccagtccaggaggatctgatgctttcttttggcctctgtacccacatggtgtgtagatatgcatgcagacaaaccactatacacataaaataaaactaagggaaataaatctgtcttgtgtacacacacatgaagactactgtttcactcaccacatattctatacttgttctaaagatataagcattttgttgtctttcctgagtccactcctctcactgatatttgctggcagcttttggttgaatacctacatttttggtcaaacacaaagtcctgctcttgcagtgtttattttctaataggagaggggagggtgctaccaaattgactaccaagatcactgtagacagtgagggtgctattagggaaataagactgtaacatgcagaacattggagtgcaggtggagagtcattcaagtcagacttgggcctacttctgagcatccatacaaaggagataaaatcactgtctcaaagaaagcttcagaaactggggagccggcttcgttaagagcactggctgctcttgcagaggacccagttcagatcccagcagctatactggcaggcctgtaactccagttccaggggatctgatgctctctctggattctattggcacctgcatgtgcatatggaaataaccacacacacacacacacacacacacacactctttctctctctctctctctctctcacacacacacacacacacacacacacaaatacactcacatacactctcacacacatacacaaatacactcacacacactctcacacacatacacaaatacactcacacacactctcacacactcacacacacacactcacacaatacacaaatatactcactcacacacacatactctctcacacacacatactctgtctcacacacacacactcacacaatgcacaaatatactcacacacacacacacaagggggggaagaataattcttcagtgagggctgctttcccctgttcactgcagcatttttcataatacacaggcttgtgtctatccacacatgatgcaataggcagaaggcatgtggagtggtgatcctgctgaatgtcaggcaggggctttctcactgggagaagattcgtgagtcgtggagtatattctcgtagcaatgggaaggcattgtgcttttcaggggaatggcatggttagttcttaattttgaaaggttactttggctacaatgtagatggagaaaagaaacagagaagtagggaggttgttacaatagtctaagcgatgacatacctatgttgggtgatgggtaatctacacacacacacacacacacacacacactcacactcacacacacacacacacactcacacacacacactcacacacacactcacacacactcacacacacacacacacacacactcacacacacactcacacacactcacacacacacatactcagaggattttgtaatgatctcctgcatctaataggacaaactgtaagattccaactgcacatcaggaagccatgttacctccttgcactataagaccaagcagagtaggaaagcatgatcttttcatttctctttaagcaagaacaagatgaaattaagcctaggtaaaatagtgttttcctataatcccagtactgtgagaaaggtaggagcaggagatacatgagtttgaggctagctgaggctacaaagtgagcccaaaggaggggagaaagggagagagggggtgaagaagagggagataaaaaggatatactttttgatattgcagaaacttatttattgcttattttattatgaattctttctggtttaagtcttttttccatgaaggaaacaagatctttttggacagcctcacaatgcacaagtatacgcacatgcatttgtatgtgacattgtggacatacattgatagatgtttacatactcacagattgtgtgatggtttttactcttttgtcttttttgtcatctttttattgagctatacatttccccccactcctcttctctcctccccctccatcctccctgcccccatgctcccaatttattcaggagacctcgtctttttccccttcctaggcagatccatgtctgtctctcttagtgtcctctttgttacctaggttctttggggttgtggcctgaaggctggtttcctttgctttatgtctaatatccacttataagtgagaacatattgtatttgtctttctgggtctgggttgccttacccaggatggctttttctagttccatccatttgtctgcaagtttcaagatgtcattatttcttactgctgaatagtaccatgttgtgtaaatgtaccacattttccttattcattctttgttgagagacatctaggttgagattccaggttttagttattacatgtaatattgctatttacttagttgagcaaatgtctttgtggtgtgagtgtgcaatctttgggtatatgccaaaagtggtattgctgggtcttgaggtagactgattcccaattttctgagaaaccaccatactgatttccaaagtggctgtacaagttcgcactcccaccagcaatggaggagtgttcctctccagcataagctgtcatcagagtatttgaccatggccttcctgacaggtgtaagatggtgtatcagagttgttttgatttgcatttctctgatgtctaaggatgttgagaatttccaaaaggatataatcagcaggttgtgatggcaccttaatctcagcattcaggacgcagaggaatgaaggtgtctgtgcgttagaggccagcctgatctacataaagagctccaagctagtcagggctacagagtgagagcttgttttattttttaaggtccattcaaatatcaaaactttatatgttaagacaatgaactaagcaatctcagggattgaaaacacagtatggcagattgcttggcacacaggtgggggtcaggcagaggtctctgggcaactgggcagagaagcttggaacacctttctctgtgtgctaagggtgggagcatggtcctagtcctaacccaaagagctgattctcctaagagaacaagtttcagctcctccctcaccccaggtcccagggctccctgatgttcttactgtcttggtgcactctgggacatgggagacgtcgccttccttgggctttgcaggtgttccatcgctcatatattttagtccccacaacaaactctaaggaaactgagttttaacagacccaggaggaagaaaggtctcttccagctagtgtggggagttgtgaatgtgtcaggaaaaaccacagaaaagactataagatgcagtccctaactgatgactaacatggggaaatacacaacgcacacgggcatgtgatctattgcactctcgggtgtctatggctgtggtaacctgatgggactcaggtctgacatccctaactcttccccgtctcttaaaaattaccacgaatgtcaagtgtcggtacttctctactgcctcccaattctggcatgctatcactttctatgttagccaaagggttttttcccctccatttttagtaaactgttattaaacattgccaaacctcttcaattagtctaaataagtgtaatctacttaatgtaaattgaagcattccatcccttttgagtgagcaaatgcctctaccacaatgatatgtccatgtggacagcaacttttcttttaagtcaaatattggcctgaattgaccaatcatttacctgaatgtatccatcaatttacacaaagaatatatggacacacacacacacacacacacacacacacacacacacacacacatgtgtgtatacatgtgatcacagtattgaactcactttcctttgagcctattttttactaataccataaagagaaactattgtacattgttttttttttatgttagttgaaggcctatggatttgtcattacaagttatgactgggatgtggctgttttcccatccttattgacaaaggcttttaggatgctgccagtgaccttgaggttcctcatttagaccagaggagagtgactattgcttcagatgatgaaatagaagcggcagcctgatgtccccttggctagctgggttcagaaccttcttacaacatcaaagtgttatctggcctcaaaactaacaacttctgggcttctgcttttttcttgtagagttctctgaaagcatagtgcttgaattatggtgattggggtcagttccaggacaggagcctggctagagctggctgccaggacctgaagcatccatggggtcttcccttccttggtagtgaatttagggggtaccagcctacctcgtccatgtgacaacatctcacagactgactgggagtggatccagtggcagagttttcagaatcatttggtctcctgatactcttgagtgtgtcgaaagacgggatgctggtagttcccagccccagcactcccctagcacaaattagataaaagactgatatgtagagctggggagggaggtggttcataaagtcttgctgtacaaacatcaggaccagagttcagatctccagcgcccatgtacagctgcacgcacctgtagtcccagtgctggggtgaacacagacaaacagatgcttgaagctcattggccgaccagtccagccagattatgatattcaggttcagtgagagaccctgcctcaaaaaaaaaaaaaaaaaaaaaaaaaaggttggggatgtaacttagtggaaaaacacttgtctcacatataagaggccccaagttcaatccacagtattgccaaataaataattaaataaaataaacaagcagggtggtggtggctaacgcctttaatcccagcacttgggaggcagaggcagctggatttttgtgagttcaaggccagcctggtctacagagcgagttccaggatagccagggatacacagagaaatcctgtctcgaaaaaccaactaaccaaccaaccaaccaaacaagtagaaagcaaccatggcagttctctgtctttgacctctgacttccacatgcagcatgtatgaagatttgtgtcttcccagcaaacagccctggtgggactagagttcatgcctaggtatcccactgcagctgtcctcaaaaacattggagagacgagtttatcctttccttttgcttatctgaaagtttcctttgctgctcgcatgggctcatgatgtgttctgaggacccaggtgtccctgcaactccattttggtgggtcacgccctcagaggcgtgctggctaccctggtctctgtcgacatctctttcccctttcccaactctcctgtgaagcagatgaactcatcggcttcccatcctcctcctcagaccccagtcacctctgctactcagggaagggagactttggctcctgtgctcaccatgccctctcccgtggccgtcatgcctggacacgtcactctactcagcatcggtccagctcacaccttggcctctagttcttgggtctccttaagtgtgcttttcctatggccaaatccaagatgtcaccattcacagcatccccatgcaggtcagggctcaggtcttgggcttcccgtaagaggaaagtctccaggttgatgggccttcctcattgatttcacgtcttcacctcaggctctcctaaaaacagtctgatccaaccactgtcccctttactgaaccaacatgactgtggtccctgttaccagtgtcaatggtataggcactgtattaactctctgccttcttcccccagatttctcagcagtactaggcaagggtgtggccacctctggaaccctccattcttggggcttccagggcgctatactacctgggcttcactctgggccgtggtcctctgcccgtagactctcctcttccctttctggccacttatgttctcccaaggggctctcacccatctttacagattcaggacatgtttattcctctggccatcacattgacttatgtagatctgatacttcttgagctcaagtcaacacacaactatctactcctgaccctctctaagatgattaacaggctctttacaatcggctgtgtcaacaccgaaccttgtttccttttcttcctcagtataactgagttttcatccctgtctcagtatatattgcaaccacccacccaactgctcagactaagagccttggggtcatttctcattcttctccttcacttgaactccacatccagcccatggataagtcctgttaatgctgctttcaaaacacatcccaccctgacctcgtcccaggaccgcagcccctgtggccagagcatcaggactcatcatccaaaaggctgcctcctttcttcctccctgcctccactgtgcttcttgttgttcatcttgcacagggcagatggaagatttccccgaagcataaatcaggttacatcacttccatgcctaaccctaattaggcttcaaattgaatccaaaatggctgccctgatccaatcctgctgtcccctcttcagtgtttctctgtatcctccagccttcctgtcctttcagccacactagttcccatcttaagaccattgcacctgctacccagatggtgtgaagcattctcccttcaggtctgtgtgagcctcctactctctccttcaggcctcggctcacatggcaccgcttcacagattccgttgctcaagcagtgccctgcttccacccagcccacagcctctcctcttacagtgttcagttttatctctcggggtacataaaaaaacttgaagtcaccaggtttgttttctgcatcttcttgtctgtatcaaattataaagttgtagcatcccatggactcagtctcgatgatatttctttccaccactcagggaaccatattgaataaagatggacatgcctctcccacgtaaccatcaccactagaagtagtcatacttagagaaacatgagtacataatacatttatatgcatatacataatgcatacatgcatgcatctatatatgtaacagagtgctactcgaggtgaaatattaaatcatcattggcctatcaatgtgaacacgtcttctctttctcatgcttcacattgattaattatccagaacaggtgtctggagtacagtgacaatctctttgagagggtttgatggatctaaggtttcaccaagtgttgactgtgggccagcacttgaacaaagtacatgatagatctggggagagcctcatgagatcttcatacgtggctcactcctattccaaagtgaagcttttgtttgactaacactaggagtcacgggctgccctcactgatttggaaggggtacatctaggtctacctggggtgtacgagtaagatcaaagaggtagtctgatgatggaactcctttaggcacagaccacatctgtggtaggttctgggtgacaatccccagggaccagtccagcatcgaggccactttaggtagctccaacagctctgaagatggtattgtgtggttaaagcatcttcagcaaagcctgagaacaccaaggcagtcaaattaaaggaaggtgggcaacagcaaaggcatttgaagaatggcattgatttaggagttcacatggaggaaatcctatcccagaagggaagtgagtcagagcttgcttaacaacattgcaagaggacaattggacttgagaagagatttaatattatacactctcaggctttaaatattctaccataattttctcatgctccactgttgaatccttcaaaagaagtcctaggaagggtctcaggtaaagccatatatgacaagagcaagtctagggcacactctgacagtcaggtcacagtgtgaagaggtccccataaggggtttccagtgttcccacagccctcctgagcagctgacagctactcaagaactacaccttatcccaccttgtgtgactgtgaatgtgtgtgatgtatgggggcatgctatcccaccttgtgtgactgtgaatgtgtgtggtgtatgggggcatgctatcccaccttgtgtgtgaatgtgtgtggtgtatgggggcaggcggtctgtctatagtttacatgctacttaaaatcccaagccacctgcagtaagaacttgaaataaatgatgggaaatcattagaacaatcttgcaagcatccgtgtaacccttaaaggtcatccaaagaccagggagaggatgtcagcttgctgtacctggaaccccagggagcaatatggggaagacacagaagttgcccatctgagtatcacaaaacccattcactctctcctcttggaatatttcacccagtggactctcaggcttcactcagaaactggacagaacatgttttcatatttaataagcagccaattaaagtgctaccatgaggggggtggggaaaatgcctccatgagttctgggaggttctatttcaaggataaaccatgagtatacccatcttctctctgcttccttggaactcacttgttctactgtttggtataaaattctccttggtggccctggaggaaggaaggattctaatgcctccactcatctttgtacaagggaaatggtaaataaactataaaagcaagcaaacaaacaaatctgttcctgggcaaacaaacagtggccggtatgccatgccatgccatcggcaagtggcagcaacactgtgcccatctctgtcacttcacaactgctgggtcattccatgtctcagagcttcctggctagaatgtcatttgctcttcatatccttccaagggctgatgaaaagctatttattactctgttgggttgagacccttgacatacaatcacttggaaggattccttcaagtatgatttactagcatttatttgatcaccaaccacttgctcattctctataaactagccttgtgggatctctaaagatccagagaaagagaagagataattcctgccctcagggtgctggtggacaatgggaaatgaaggccagcaagtccacagtggaagtcccatgggctgtgagatataggaaggaccatgctgggataagggcagtgtatctaattcaacctcagagagctccaaaaggaaacactttgggagggaagggacttacacatctccagacttcaaggagactagaagcccaaagaaatggaagacaaagaaaaacggtggtgtggcccagataaatgagagagcaaggccctctcaggcacctggttacagaaaacagtgtgtgtgcccatgtgaaggaagataaggcaggccggcaccaaacggtggagattcttctagacagctctgtgaatgctgctatttattgtggaggttgtgggaaagctgacctgatccctgctggaaatccatcctggcagcaaggaaagaatatagaagagcaaacccagaggatcaggtgagggttgaaactaagccgaattcacaacccaccaaatgtaaaggagtctggtgtgatgtccagccttctgatacagacaagccactctggattttaatgcactgctgaatatatatctctatctatctatctatctatctatctatctatctatctatctatctatatctatatatctatatatctatatatatatatttccccagtgactacaattttttctttatttccacaggaactccccctcccaccttcctaaggttaagctcaaaattatttcaactcaagaagtttcctctaggccgcactttgactttgaatcaagagtcagagtgtgacgccccaggaggactctggatcatagagctgaattatgatggcttgatgttctcagggtctattacaattctcgcttaaatggggtgtgaccttgaagacacaaaggatggggatcccaagaatagaggttgggctgccatgcaagcgagatatataaatatgaatgtcaagccactcgaatgcatgaaaggcttttaaaatgccagagagttccaaagtataccgggcctcacagtcacaatgagatgataatggaggcgaccagcggcagggaccacccaccagcggtttcattgctgtaactgggaatgaagggtctccctggaactattgacactggatggcattgtcatttttagcacatgctaactctgtgcctgtgaaaggaattgtctctgttaagctggagccagactatttatggacatcccggctcccactgcattccggtgccatggccataggtaagaaaaaaatggaaaatgcctgcttggtttccacacactgacccataaattccatgtctgtgcttaattaaccgaggaagaaatatgctccagggttctcttttctttctttctttttctctttttttgggggtggggtggggtgggctcaagcttaagttcagtccaaacccctaccttcggttcattcccttttcttctggctaaccttgggtcacagtggacactggggccacccacaaagcaataggtcaaaggtctgcacttaaccctttctccagctctagagagaaacaaaaatcacttgcttttctttgcagaatgcaaagatcagacaataattatcccattgtccctgctttagaaatatacacacaggcacacataccctcatacactcacagaccgcgtgcacttgtacacacacacacacaaacacacacacacacaatgtgctcttgccatctgtgctataagaagtgagcgtggtacaagcctcgctgatctttctgttactccatagttaggactagtcagtgcacaggaagggggaaggcttttgtgatttctttctatcctgctggattatcaacgccacatcccacctctgtaactgggacaggcagagagctaagaggtgacggcaaggagtcagcagtggtctctaagcggtaggcacaatcttgagggcaggccaaggaaaatgaagtgtggtggagtccacagactcttttacactaagaagctgggtaataggcagccaacgtgcttaggtagaaacaaacggttctgggattgtgctgtgcagtgtgttgagtagaggtcacaacagcccaatgcacatttcaaacacaaagagaaatgttaataatcttgactctatcattgtacatttatacatgaattgagctatcgcattgtccataaaggacaaattctgaggcaggagttaggtggtcccgatacaggaaggttagggctcatggtggatcccatgatagtcagggcccatcccctgaatggatgaggtatgcagtctcttcactcgcttggccctcaagtgctcaaaaatgtacagtttcaactgaaagacccccggaagctcaggcccccaggatctcagcccatcaccatgcggaggcagaaacttgatgcaaactgcacgaggctttattatagttgtttaacgagctaaccccatgttagctcaggtctttcatccacccaccacagcgggtggctaggaaagatggcaagaagccactgcatagagatcttatagggcagcgtaaggggaatgtctaggggtacacacaggctcaggattggtgtgcctccaggcttggagggtttgccctgtgttgattggtcaactggttgttatggcccataggccctcccaggaaggttgctatgctctgtgcatcattgctgtgcacttgtctgtaaagcacacccagagccgtaaagcatagcaccaccagctaacttctgattggttcattgccacgaggcaggcatctaacctcctagtgaccaaggcaaggtcagggcaagcacgtgttactgtcatggccaccgaaaggggcagggatctgaccttagtgaccaagacaaggtcaggcaagtacgtgtttggctgttatggctgccgaaatggggagttggtcacttcacaacaaagcacctctatcctactacatcttgttctttcaaaactatccataaaagatctctgggtggggcttctcagtctaatttctttctcagagcccttcctactctcaggagttcttcctcacttttctttatttcattaaaagtatctatttatccatgtacttgtctatctatctgtctgtctgtctgtctgtctatcgtgtgtgagtgtgtgagtgtgtgtgtgtgtgtgtgtgtgtgtgtgtgtgtgtgtgtgtgtgcgcgcgcgtgcgcgcgcgcgtgtgttagaagctgcttgctacagcattcatgtgaaggtcagaggacacttcaggagtcggccctctctttccactatgtgagtcttgagaattgaactcagaaggttagactgactgatcaccttttcctgctgggccatttcatggcccctttctcacttttcttaatgaatctatcttgacttgcctcactccttgtgtacgttttcttaccttctgaggcatgagacaatgaactcagagccactggttagggatggctttggtaaacagtaaccatccaatgccttagatccttgagttaagcacaccaagaactaaataggcttcagtagcactcaaagatcccacatgaatgctatatacacatgaaaaactgttaagactagggtgtcaacatagcatgtacttagcatgtgcaaggccctgaattccactcttagcaaaagtaacaggaaagaaagaaagagctaataaaaagaaagaagaaagcaatgaagtttaagaatactaactactcctgatttgataattttgtactacgtccatgtatcaaatggtgacactatactacccaaatctgtacaattaaaataataaataaataaataaaaggggggatgagtttttgtatcccaagtccatttaactgggcagctagcttattcttatgatttattttgtttgttaccttgctgttaaaataggagattcatttgcttaaaataaaaaaaaaaatgtgttctagacatggggggcccaagggctgatacagtgaggctttcttcacaatataagggggtaggggctcacaccgcaggatgtctggcaggctgacagacccataggaaaccatgaagacctaaacagactgcacgggaggagaattgaagtcgggtgtgtgctgttgttaaagagatgagcagagtcagtccattgggactgtgtcagcacaggagaggtagtgggtgggcctgcgtctgagactggtgtggttcctagaaacattagtgatgactcctaataagttgaaagagtagctagcttggatctcaccattgcccttcatgagctgagtaaccacagaaagaaaggtcagccttgttaaacatcagtttcctcatcagtaaaaccgggtgtgaatagaattcctgtggaattatggtgtgattgagtgaaatgtttcgtgtttcccagaatgcagtaacatgagccactgtggtatcgctatgggttgcgatgaaggcaggatattgatccgtaacagctctatgcctgggaaccctgactagtgactgttatgacttccacataaggaattaggaggctactctaggaatccctgttctcattcatcaccaagccccacccaccaccccacattgctcactaggatgcagggccaaactagcagataaactcatcgcatcctgtcaggttcccattgcgggtggggggggtggggggggggggacacagatacggagcattgtcttccagtccctagaccaatgagtaaagtacatgtttaggaaatcaccatccttatttcattatggttaacagaatgtgattacccacccccaccccctacccaagcagcctgaggttagaggctgttaaaactctccattcactgatgggtaagagacctgctttgtatttgctgagggcccagggctggaggagaagggagcaggactcagaagagctgggaagccaggaagtagaaagaaatgaagtcggcagctgggaatgtcttggtattgtctactgccttactgcagatgtgactttcacgaagaaaagccctccattgagaaaagaacacagtggggttggaggtgtgatggggcttgatgacttcaggtgacaaatgatcattggatgagtagatgtgactgtgctcaattcctatggcttaaaagaaaataaaagactgtacacccccccccacacacacacacaaggtaccatctctatcacaaaataccaaattagggggtagcacatggcaaattttgtaattcatgcagaaaattgtatatttgtgctaaaacaatggttccctcttgtctggcatcatgtaaaaactcttggggcctgtggctaatgtctggatgttgcttgtgatattggctgcctctaatagacatgaaattgtgaaagtgtatctaatgattcttcatataaattctctgctgtgttctgatttttaaaatagcatttaaaatgtaatgtcagagagagagagagagggagatggagagagagagagagagagagagagagagagagagagagtaagtgtaaatagctacttgcaacacacttaaggattctgtatactgtgagtttagttaaaatgtttccataaatctttatcctaaatactaaatacatacctcttgcaagtcagattgaagctgttcacccctgaaaggcaactggcatggcagctcacacaagaaaaccggatggtgctctgatttgcatgtgaaacgccccaacaggctccttgagcacttgtccccacatcactatgctactttgggatgttgtaataactttaagagctgactttagcctacctggaggaagtaggttgttgggagaatgagtctcccttgtagctgaggttctcttcctgttccagccagatgtgacaaactgcgtctgtagacactatgccttctctgacgtgatggacaacggagctctgaggaacttctgtgttaataaacctctctcctctaagctgcttctgccagacactttgtcaccacaatgagaagagtgactaacagaaacatgtccatgcacaagttaagtgggtaaacaaagtgtggcataccacgctgtggaatatgacttagccacccatagagggaaatcatgacacaagctacaacatgatgaaccttgaaaactagaggagctctcagaaggacaaatacagtgtagcaatttagaggggagactaagactggttataatcaaagacacaataagcacagattctcaagggctgggagaggatattgcttcatctttacagtttctatttagggctgcggatggaactcagtggtagggcacttgcctctttagtgccacaaacaagcaaaacccagagtttccatttagaaagattaagaactccccagatacatagaaagtaatggtgatctggtgtcatgaacatacttaatgctccacgtttgtacacttcaaaatggtgacaatgttatatatagctttagcacaactgtcagcaagtaagccagcagccagaggagtcccactttgccctctgctcttcggcatctaaaacttgcgaagagcagaagtgtttggtgtctcaggattctgatgataaacacttcaattcctgctcactagatgccctgagtggccagggagtgcaaacctagcataggcattgagataaggtaaagtcttagaaacctaagacttgcaggtagttgcagggtggaattaaaatatacatgttagtaaatgaatcaaagtttcaaagtagaaaaatatcagtaaagaacgatggacaaaaccatgaacaaggagctcatcagagacaatatcagaaattctatgtatatggattatgtctcctgcctgtgcgtttcttgttagattcttgaaaagaaattaaacttttttttctcctttcaaatgcccagagctgtgttcttggttaggttgtggtaagaagttaatgtattgtcttttcctgagcactgactggcaagcgactgcattatgacgggaggaaactgggcccacgttctcttgtagttgattgcaatggggtgtggtggagggtgagcctcccacacttggaagacatttccacagactcgggcaggttggccatcagaaaatttctttcagtccttcaatctgtgtacttccttgacacctctgaggatgtctgaaaacagctactactggggtgttttgtttgttttcttctacattgttcttgttaggccaagctgccagacacgggccggaaacattatccatctacgtagacttgcatgagctccagggatgcccctgtctctgcctccctggtgataggattttaggcttttacatggacactgggtcttgaattcaggtcttcatgcaggcatgacaagcacttccctgactgagtcattgccccaaagctcgagtcttgtccacggtcatcaccagtcaaacaggatggtgcagatttggacagcactgtagggagatgaagcagaagaggcaactttgtctggattgtccttccagacactatctataggatttctcctctgacttggctaaggaaacgtttgtgtgacctgtgaccagagccccatccaggccattcacatgtaaagatatctccgagctggctggtgagagcagctgcccagcaatgctttgtgtgactgcacaatagcggcatcccaccctcccttccagggtactgggggtccatttggtgtccctgccgccgccgccaccgctgctcttcagctgtctgtgtgaggctgcgtgtgtgaagctgggtacagtgtgcctttgaggtggctctttggctgtccaccgcagctgtcccacttgctctggcaccgtgggagcagctgcccggaggccccctggacacatccggcccacaaagcccagcacaggccatgtgcccttcagttctaagagtttgctcaagccacgccctgctagtcaccactgaccttgtcctatacccagcgcgggtggttaccctgctgccagttgttttagcattacctggaccaaagtcgcaagtctgatgtccacgtggtctggttcagtacacgctttatttgtgagggctgactaaccccaaacttcgaaaagatgagctttgattgacagcaaaagagactgggcaccaaaagcagggactgaactcaaaaaagtcatgatggaatctgattctactattttgtttttaattgtttggctttattttatttaattcagattttgcacaggacctcaggcctgataagcagcaatcctaccaagcccttgtctcgggtgcctgacgctggaacttgagtgtaaccatgccttagttaaagggtcttcttagtcaataggtttctttgtgaaaatcacaggctctgtgagcacatcactgaagaggactggaaaatagtctcaattattttggccactccagtgtagggagctgaacttccaaaggagataaaaagaagctcagagttgctatgtccatgacagactcagggcttgccttgttctcaggggaatgactccagaactaagaactgtgcttaaggggtcctgatttgaaaatattttctacaggttctgagctaggtttctctctctctctctctctctctctctctctctctctctctctttcaattatttacatctacttaagcttattttttaatttaatgttttgagaatttcatgaatactatagttacatcgtttccagccccctctctcttccaactccttctgtcttcatctctcaaattcacgacattcttcaatttttattgttacacacacacaaatacacacacacacacacacacacacacacacacacacacacacacacagctttacacttagtgttgctcatatgtacatgtgtttagggttgaccacttgggattgatcggctgtaactcttcatctaggggtgggactctaagatttcccccataagattctgagctgacatcttcaagaagctggtttccaggttacctatgtcttacagctttcctgaataaaaaacaagtgatactgccttagcatgcagacctgctcattttacatgcaggacaaagcaggaagccactcagctgaagtaaagcagttgatggaaaatcttaattaaaaacaatgctttggtgagacttgacccttgagctcccacagtactcaaagaataaaggagattgacaagtcactaataaatgtgcttcccaatgagaatttttctggctcttgtagagacttaagggtcttaaaaaataatacttgatctatcaaaattaaaagtttcacaaaattcacaacctaatttttcctcaagcctttaggtttagctcacacatctcgttattctatttgtacactgtacagatttttacaactgcatttgataaccttttccagtctcaactaaactgccataaatattttaggatattttaaaagctgtgctaaatttcttttttaaatgtttcaactgtctggtagaataaacattcccaggttcacatatcattccttaaatctgataaagaagagtgtctatgtctgatgagtctgaagctggtttgctgagagggactagtggggaaagatatttgccacgaagtttgaaacccaagacccacatagtgggaggaaaaaaacctgactcctgtaagttgtcctctgctgtctacatgttcactggggcatgagtgtcccccccaacctgaacaaaatttgttaataccctaaaaattaactgtattgcttatagtttcaacttataatcataaatcaaattattaactcacatttaaattgaattgtgaaatttgattgatattttcttatatactgcagtatactcattcctcctaaatattccaaatatttgatatagcaaatatatacatattagtcctaattttagtttaaaatctcattttgttttgattcattttttaggcttttaatttttacttatttttatttcatgtgcattggtgttttgcctgtgtgtatgtctgtatgagggtattggaatccctggaattggagttacagttgtgagctgccatgtgggtgctgggaattgaacctgggtcctctggaagagcacccagtgcttttaaccactgaaccatcttcacaggacacattttcaggttttaatatttaatgctatatgttctgggcttaaaatcttaagaaaaatttaaaatttattaataaaacaaatttggggctggtgagatggctcaatgagtaaaagaacttgctgttcaagcctggcacttgaatttgatcagtggaatcaacaagaatgtagagaatcaactttctggtcttaacatgcacacacacacacacacacacacacacacacacacacacacacacacacagtctttctccacatatataatgcatgttatatattaatatgtttatatatcaatacatcaatatattttttattacaccaactcattcaagcatactgaagtttcttaaggatgtagccatacctgtgaactttaattttctctaatcatggtgaaacaccatgagtttgtttattgtcaggacagcatgcattcatctgttgttcataccccttaattaagtcctatcgtgtcttaattttttgttcactctctgaaatcttcagtctctaaacaagatacagctaaccacttccactgcctcttttggatttgtctgtctttgactcttgggacacacaaccaacgtcttaactatattgcatgtatttcccatgtcttagtttggctctctctgtacaactaacacaaggttaatagtgtcagtatggcacactgatggcagtagatggtactctgcccgaagggacctaaccaagcttaaggaataaacaggggctgccaaaggaagaatagaaaatgcttggatacgtccatgttctacaagagggcaggatgacagcagaggggactgtgatttgtcagtcctaaaggcagggtggtgactgcaaaaatcctaagagatgtcattggccagtgaatggtggtccataaatggcagggactgaagacgacagatcaaggagagaaaagaaatcccatgccttacgtaaactccagcaacagttgacttttgtctgaatttttagacaagcatctttaggtagcaattccatgttgccacactgacagtgagaacagaagctcctgagtgacagctgcctaggggttgggtaggaggacaaagctgttctctggttacgaacattcaggagccaggcatgttcacactgctcttggaggctgtctcccttagctcaacagcccttctccacaagggaagcacatcttctcatatgcaaccctcctgctccctgctcttctctttgaatcacgcattcaaactgtgatcaggagttgtgtagtgacttggacactgtctgtctctcctgctctctgagaaccaaggctgggtatgttttgctccttgatacagcttcagcatctagttcaatcttgaatctaaaagattcttgctagctctttcttggaggacagagaccaagaatgaagttcttcattggatgacgaagaataactgacttaattaatcagacaattaattaaagtaatagacagcagtccctggtggtagacacaaatctaacaaattcttttaagctgcttaggatgctttacaagcacacatggatcaccacgctacagtggtcaagacagtcatacacatacatccacactcacgtatgtcttggttgggtttctgttgctgcaatgaagcaccgtgaccaaaaggcaagttggggaggaatgggtttatttggcttacacttttgtattactgttcatcatcaaaggaagtcagagcaggaactcggtcaggaacctggagataggagctgatacataggccatggaggggtgcagcttaatgccttgctcacactgctttcttatagcatccagacccacccacaatgggctgggccctcctccatcaaccactaattaagaaaatgtgttacaggcttgcctacaggttgatcttagaaaggtattttcctaattgagattccctcctctcagatgactctagattgtttcaagttgacataaaactatctggcataatataaacacacacacacaatatatatatatatatatatatatatatatatatatattatatatatatatatatatatatatatatgcatgctgggtgatcaccaacaattcatttaagctctggggctgcagtttttctcatttgtaaaattgaaataatattgttcagggtgagggggttggtttggttttagataggtagagattacacataaaataattttcaacaaagtcagtgtctcaaagtcagctaccatgtattctctttactcttactttgccttatgtagaaaggttagagtcttctagtgtgcagacatgcactataaataagaaaagacaggtcagaggcagactggtgggagatctgagatcccaggaaactcttagaacttgtgtgcaactttcaaagaatacaaaggaaaataatcccttggtgagctgtgctaaccaaagattgcaatgaacactgtgtttgaaacattttaaatgctgtggtggtgtagctcctatggaccgtctgactttacagtttcgtttacactgtagtcacacacatttggtatagtaagtgtctcagttagggtttctattgctgagaaaagacatcatgaccacggcaactcttataaggaaaacatttaattgaggtggcagcttacagtttcagaggcttagtccgttatcaccacggtggggagcatggcagcgtgcaggcagacatggtactggagcaggagctgctacagcttagtctacaggcaactggaagtagactgagactctgggtgtggcatgagcatctgagacctcaaagcccacctctcattgacacacttcctccaacaaggccatacttggtccaacaaagccacacctccaaatagtgccattccctatgagcctatggggggcaattactgacaaactactacagtaagtattttggattgttgaaaaggatcttaagttcaaggtcaatctgatcttcattgggaaaccctgtcttagaaaaaatgaatgcaaattaggggagtcttattacaggggaattctgacctgagccttatgtaaaagatggcttctcaagtctgtttactaggtttatgatactttgatttaaaaacaggctgtgtggtagctagaaacttctgatgtctagtctgagagtgaaggttgtctctcaagtttattgctaggtttactatcatatggtgatgttttataactggtggaggatatcctgtatgctgagactatgtgtttctcttattggttgatgaataaagctgtttcagccaatggccaggcagaatatacctaggtggtaattccaaacaaagagcgagtaggaaggcagggtcaaggagacaccatgtagctgcccgagaagcaagatgcaagggcatcaccagtaagatacaaccacatggagatacacagattaatagaggtgggttaattcataagagctatccagtaagaagcctaagccattggtcaaacaattgttactgatattaaacctcagagtggttatttcataagcatctatggggacccggtgggtggtgagaaaacttgtccaatgagaatgggcaagacagaaagaacttccaactacatataaatgtaaaagttaccctgacattcttctgtctttctttctttctttctttctttttttttttttttttttttttttggttttttgagacagggtttctctgtgtagctttggagcctatcctggcactcactctggagaccaggctggcctttaactcacagagatccacctgcctctgcctcccgagaactgggattagacattcttgtttcttaagctgtaattattgtaatattgtgacttagtgtttttgtgcctctgaaaattttatgacccctcaggataagaacccacagggggtctgctctgccagtagtctctggccttctcctaagctcttgttgtaatgttcctattacttcacatgagacagacactatgatgggctcagggtttttaaaaactaagtatttcatgaaagcacattcagacatccacataactattaagagtaagatgggatctgaagtcaattggctacatctgttccaagactcctcgtattttagcacttccttttagtaacaggaagcgagatgatttccaggcagtatgagggtgcatgagggattccaggactccttcacaccttcaattttgagcttgagggagctatttccactccaggtcaagctgtccacatgaaagacgagggaacttgaccactgggaagtacctactaggttcgagaattctagaaagttctgcatgaatctacggagaggaatactgacttaggctaaaatgcaaaccaaaacccatgaccgttctccaattgcatttttgtaggaaagcaagcaaaagttagattttgtgatgttgcctggctctgtgcatccttggcgaaaggagaaaggagtcctatttaccattttctcctaagtgtaggctttccaaagatatggcagtcagtttactttcacatatatatatcttggtttagtcatagtgaagaggagttggttttgaaatgtcaaagcgctggcctcgagcaagtgggcgcagttccattcctactgtggagtgtggaagcaggcctagagaggaggcgggggcattgagctggatccctacctgtgggctcatcctcaggactcagtggctccatgcatgcactgtaagcaaagctctgaacacccacccagacagcctgctgtgtctgccttgatcttgcagtcagcttctggagtctgcctccttcataggaaggtttccacccgttctgtgggggcgagtgcatagttcaaactctgttacaatgtggcctcagcatggtgggctggaagcacgtgacacgtatgtgttcatactgtgtcaaaagagacagcaagcccccctcttcatgcctgcaccggagacggaatgacagcctgagcaattcttgagaaattccgagtctctgacttttaatccctgctgtgctgcatgtgaccctagagaaacccctttagtattccattctgcatcagtgtccacatctgtaggagtgtgagcccggccacacagctgggaactattagcagcatgttgctgttgaactgatggatgagagctcttcagaactctgctaccttctccttagagaatggggaacatttctaagacatgaatccatttagggctttggtagaccctccacataacccttggccatttctggattccacctattcctccactcacaggcatctctgccagccatgagtagttgccattggatggcaggggtgggcagaaaccacagcaagcaagagactgaattgtgaagaaaatgaagaggttggttgagctgggcatggtaggccatgtctctaatctcagcatttgggagacagaggtaggtcatgagtttgaggccaacctgggatacagatccaggctatatcttaaaacaaacaaagcaaaaatgagggagctggcaatggaaaagaagcatgtgccagggaagaagggctcaatacatatcttaggggcatggtgggactcagccagacagacgtgggttcacatagcccctgcagttcttttctccatcagtcaaggaaggccagcataggctaccgaagatgaagcccacggctgcgtgcagatctccttgtacagagttggcatgagtgatagccattgaaattcacgtcatgctcagtctaccacatggcatcatggacacctgtctgtttccctttctgagttgccagagcctcagaagcaggaatcctactccccaggtcatttaaggaggtaatgtgtgcagggcacttggactgacaataagcatgcaatgtctattggtcaggctttaggagacacggtaaatttttgctgaaactgtgtggtgagcgtttacagtttgtccctggactgccaaggtggtttgacattcttgagcctccaaagtaaagaaagataagggaaagattctactttgtgtggaactccaggaaatgctgtggctaacttcaaagtgatagtttcattatcggctgaaagagaacttagaggaaagttcccacagcattccctatgccgctctgtctgaaacatcccggagaatttgttcccagctaggttgttcttcttgatctgctagtgtttcctggaaccacttagatcttccacttttgctgtaggttgaagatagtcggacactgatatcataacggaaggaacatgcacggatatttatttcatgcaaataaaagagggattggttgtctactagcagtactttccgtggccattttctcaaatgagaagaagaggtcagtggtttccattctgagtcccccaagttgtgatcaaaatgaaccactctcctggctcttcaaaggcctgtccatggtttaaaagtcttcagcctcagcttcctgacagtcttcatttcccccaggatcactctgggaattattctatcactaaacaacaacaacaacaacaacaacaacaacatagtgtacgtgtattcctatgttatatgaaggacaacactgaatgtcatccttcagacactttccatcatttgtttgtttgtttccacattttgcctccccagtgctgggatcacaaacacagaccaccaggcctgacttttttttttttttttttaatttgggttctgtggatcaaactcagcaagtactttattgactgagctatctcttcagctcttttgttgttttcatcttaaaaaaaaaaaagacagatgaggtcattgtacatcaggctttgttgtaagcactttagacctattgacttgcattagtcacttggttctaattttagtatatgtgctgctggcgtgagccttagcctcccaatttgaatgcaataggttcgatcagttttcatcttttgcaaacaagggaagtgggcctgggtgattaaagaagctcacatggatttacttattacacatgtgtatgtgtatggccatatcaatccacaaggcatgtgtggaggtctgaggaccacttgcaggagtgggttctctccttctaccacagtgttctagggatctaacactggtccccaggcttagcagcatgtgcctttaaccactgagccatcttgttggccctctacagaacttcttgaattaatattcccccttttgttaatggtcaggaacattattatcatatacttttattactagtatctgaaactggcccatatctttgaggtgtgtatgtatataaatgtcttagttagggcttctattgccatgataaaggcagtgaccaaaagcaactggggaggaaaaggtttatttcattgtattatctactgtccatcacaaagggaagtcagggcagggactcagggcaagaactgatgcaaaggccatgggggagtgctgcttattggcttgctccacttgacttgcttaggccgctttcttacagaacccaggacctcttgctgagggccggcactgtgtacagtgaatgagcccctcccatcaattatcaaatatcagtccagaaaataccctgcagtcttgcctataggccaatctgacagtatcatgttttctattgagtttccctcttcccagatgaccttagttgtatcaagttgacaaacaaacaaaacaaaacaaaaaccacccaacaagaacaacaaataaataacaatctcaatgccctgtgtagctgagcctaaaaaaacatgatatagatgaggactttgtatttatctactgcctgtcttcctctttgacagtgttggttttgaggatgctgctagagaaacagaggttcaccacacatttacctggctgactagacactttacagccagtggtttctgtttgcatttgtaagtctggatttttttttcctgtagtgctattgagcatttaaatgagttcttttagatatatttgcatttgcattcaatgtagacagaaattagtgtttggaagattgcattttagcctatgttgtgctaatgagcagccataatagcatgaaagaacattttccaaatatctgtacaggtagcaaatgctgcgatcataacttaagagacaagaaagccatcaccggaatgctttctgtgcctctgactaaaaccccaatctatagcgcagtaaagagtgtcttgaatcctggttgacaagcttcccagagaagaaaccggccccaccaaacaagacaccgttttctgaacagcttaattgaattaacgggaagattattctcttggcaggatattgtgtgtgtagtggggggtggtagctgttggttgcaaagcagacttactcaggcacaattggccactgctgtctcttaattggtagtgtggctcctgcctcaaagacttcatcccccgcatttggtgttaaaacaagcatcaatcatcctaagtctctttggttgagtgtgtaagtacctcctctgcctttcaaagacatggtgtctttctctgtctattcatttcttctgtccacagtgagtacctagtggtgtgcaaacaggatacaggacagtgtgaaccccaaaagggagaggagtttgaggcctttattgaaggaggctttctttctatacctccaagcagctttctttcatgggtaatttgaagttatgttaatggtagactcttaggatttgaacaacagtggctccaacctctggtttgtggcagttcaagttacatttcctgaagtgttgagagttgtggagttttgtttttgctgttgttttgttttctgcttcccttaaaaatgtttttttttccttttattgaaagtaatttccccatgtatggttttccattctgctactcctcccagttcctctgcacccccccctttctgtgtctcagtagaaaacaatatcccttctccaggataataataaaatataatataataaaacaaaacaaaaactaacaacctggaataggacaaagcacacaaacagaggcaggggagtccaagaaaagacacaaaaaacagatatagagacagagactcacttgttcacacactcaagaataccataaaaacactaaactgggagccataatatatatgcagagaacctatagagtaaaaaaaagagaggggtaaataaataaataaattagtaaataaatgatatatatttaaataaaataagaattaaaaatgaaaataaataaataagtaaatgccttggtggggcattatgagacaagaaacttccgaagaggcctttgagtttgttttctggtggccaacccttaagagtactttgtttccccagcgtaagccttggagaaaactaaattttcatttgcagttggctatcaattggaaattgcttctgggttatagaccggggcatgtgcccacttctttaaagcctaaggactacactggtatggactcatgctagccccgtgcatgctgcctcatcgtctgtgagtttatatgagttttgaccgtgttgatttagagggccttgctttcttggtgtcatccatcccatctggctcttacagtctttctgtctcctcttctgaggggagggacttgatggagacatctcacttaaggctgagtgttccgagggttctcactctctgcgtactgtcagtcaaatcaggtattggctgattgctcccacagccttctttgtgccactactgcactagcattatcttgtaggcgggacgccattgtggatttcagggtttgtagctaggttagggtttacatgcaggagtaccttcctataccaaatatgacagccagtaatagatgaaggctctctatagccgccagtttgacttttccatgttcaacgagttgtgcagtttttgtcttcatcaacagagatttgctagcagtttgtggagagcaacctatactcttggcaacagcctgggttgtttggggggttctcatgggattgctttggtttggttgcttttcaatattgtagatgacaaaaattgggagtttctgcttgggtcatcctgcagaaaagcctggcctcatgatatgctgagtcaagttggccaattccaagagattctgggtttagctatccaattctcccaattctttggctctcacttgatttttctcctttatagcatcataattctgggtcccagaggctgaggtgacatcaggaatccactcttaaatatgggctctgtaggccagggctgaaggtgtatagctcagggtagagagttacataaaatgtgtaagtctggtgttaccctttcttaaaaataaatagaaaattttgtctgtctgtctgtctgtctatctcacagaaagactgggacagggcccaggtgtggaatagagaacctggagatggaagaaccccaggagctggtagaggtatctgagacacatgcaccatcaccccttggcctgcatggagtactggggggggggttctccatacagagacactgagagaggacagaaggaaagcatgtggggaccctctctttagtgcagggtgggatctcctttcctgacactggtggggcatttaagggccatatccccccagaggttcttttctagttagcttcagctgccaatctgacacagcccagagttatctgagagggtctcagttgggggttcagttcctgaatcaggttggcctgtgggcatgtctgtggggcattttcttgatctaattgatgtaggaaggcccagcccactataggtggtgtcattggcgggacagactggtataagaaacaactgaacatgagcctgagagcaagtcaggaagtcgcatcctccatggtttctgtttcaagttcctgccctgctggagttcatttcacgcctcaacttccctcagcaagggactgtaagatgaaataaagtcttttctctccaagttgcttttgattgtgctgcttatcacagcaacagaaaagcaaactaggacagtttctgaagacttgctgtctattttataaccattaccccataatcacaagctccagagacaagccctcttcttaggtgggaaactgagtgagtttatctctgaagctgtccctgggatgccagcagactagcagaccattcagtggggccgtagcgtaggctcatgcatttaaacacttggtcccatgttggtggtgctgtttgggaaggttaaggagccttgctggcgggagagcatcactgggggtggacgtggagaacatatagccttggcctgcttctagttctacctctctgctttttgtttgctcttggatatgtgatctcctagcgtcctgctctggccacctgcttccatacgtcccaccattatgtactctcccgctctggaactgtaagctaaaataaactctccttctaaaagttgttttggtcatggtgttttatcacagtaacagaagagtaactgatacaggggattgtggccattctttaggataaggaacacacacacacacacacacacacacacacacacacacacacacagagagagagagagagagagagagagagagagagtttggtatagatctaggctcaccaatctctctgtaaaccaaggcataaacttgaagcctagaattctttcaaggacacttcaatatctcccagccacctacaaacacaattccacaatgccctttcggaaggagtcccgtcaggtgctgcttcataattgtagtgtcatctgtcgctatgctctcaaatttaatggctcctagctaagatgcacatctttatttacatagctactgatgagggtaatttgcttcaaatagaagttatgatttgcaggaccatctatgtgcttcaagacctctagaaatgtcataattaagctgttacaaggatgtcagctgggagactgtcttatatgcatagtattagccatgtatattcagcttttaagatgttttaactatcagtgcatgaaagtgatttctgcaataatgccagtcccttgaatataacatttggcttgaatgttccgttaagtacccatgtgctatataaaggcttagtcctcaacctagtgtcattggaaggtgattaggtgatgaaatctttaagggttggggcatgaataggctttaaatcattgagctatggcctcaaaagagtgtggagtgcctctctctctctctctctctctctctctctctctctctctctctctccattactcctctgccatgatgtgctacagacataaagcaatgggtatcaatcaaccatggaatgaaacctctgaaagtgtgagtggaaacctgcctgtcctctgtagaggttggctatctcggggattttcttacaaccacagaaagctgtctggcacacagagagccatctggttatccattgctgctcagcaccaccctaagacactaccataaccattcacttttatcatggtctgccttgggcttgggagatccgcacatctcaagtactcagctctagttgagactatagtagctgaggcttccgtcctctaaaaggcttctctagtaacatctctggcagttggcctcaactgtcctagggccaaccattgggggtccttactccaatcaccccctttattaggtttcctaaaattgggccactgtctgccttccatcagcaccacagaagtaggtaccagacaactaaaatattctttattttccaaagctacttaagatcttaagtcttagtttcccatgatgcttctagacaaaactgaattaaaggtctcatttccatccctgtcccttgcttcctgacccacgctgatgtacccttgtatgacccccaaagcatgacatgtcttctgagattgctgggctactcccgcccccaggtagggcagaggtgagctgcttcggcccctgccttgggcccaacttcctcctgcccactctgggaactccccacctgaggtctgcaggcagatcgattcggtccctgaggaacaagcaacccagagtctgctgacatctctgcactagtcccgctctcacccacctggagagcaaatgcctggaacccgcctgcacccaccttgagccaattgcacccaccggaagagaaccttggacccatacacaccaggaaaggaagagacaccacttgtacccactggaagaagagatgggaagataacaatataaaaacacatccaacaacaggaaaaccagagtctagggactctacaccatcaagacctgcacatcccaacacagatgaagcagaagagagcaaccttaaaaaaaaacttcatgcagatgatagagaccctaagagaggaaatgagaaaatccttcagagaaatggaaaagacaaaccaaaagatacaagaaatcaaggaaagccaaggaaatacaattaaacagctgaaggaaacagttcaatacctgaaaactgaaatagagacaataaagaaaacacaaactgagggaattctgcaagtggaaaagctgagcaaacaatcaggaaccacagatgcaagcataaccaacaaagagatggaagacagaatctcagatgctgaagataaactagaggaaataaattcatcaagcgaagaaaatcttaagtccaacaaatccttaacacaaaatatccaggaaatatgggacaccatgaaaagaccaaacctaaggataataggtatagaataaggtgaagaaacccaactcacaggtgcagaaaacatattcaacaaaatcatagaagaaaactttcccaacctaaagagagacatgccactgaaagtacaagaagcctacaggacaccaaatagagtggaccacaaaagaaagtcccctcatcacataataactaaaacaccaaacatacagaataaagaaagagtactaaaagcagcaaaggaaaaaggcccagtagcatataaaggcaaacttatcagaattacactgaacttctccatggaaactccatggaaacatgaaagccagaaggacctggatattctaccaactctaagagaacatggatgccagcccagactactatacccagcaaagctttcaatcactataaatggagaaaacaagatgttccacgacaaaaccagatttaaacaatatgtaactactaatcatccctacagaaagtactggaaggaaaactccaacctaaggaaactaactacacttacaaaaacataggtaatagataatcccactttaccaaaccccaaaagaaaaagcagggtaaatccacatacgataccactaccaacagcaaatcaaaaccaaacaagaataagcactcaatggtccttaatttccttcaatattaatggtcttaactcacctttaaaaagacacaggctaacagagtagatacaaagacagaatccatccttctgctgcatacaagaaacatacctcaacttcaaagacagacattacctcagagtaaagggttgggataagatattataatcaaatggacccaagaaacgagcttcagtagctatcctagtatctaacaaattagacttcaaactaaaatcaatcaaaagagatgaagaaggtcatttcatattcatcacaggaaaaatccatcaggaagaagactcatttctaagcatctatgccccaaataaaaaggcaccaatgttcgtaaaagaaacattattaaaactcaaatcacaaataagacctcacacagttatagtgggagacttcaacaccccactctcaccactggacaggaccaccagaaagaaacttaacaaagagacaaaggaactaacagaagttatgacccaaatgggattaacagacatctatagaactttccattcaaacacaaaagaatataccttcttttcagcatcacatggaatcttctctaaaatcaaccacatactcggcaacatagcaaacctcaacaggtacagaaaaattggaataaccccctgtgtcttatcagaccaacatgctttaaagttagaattcaaaaacaacacaaattgcagaaattgaacaacacgcaattgtaccattcctgggtcaaggaagaaataaagagagaaattaaagacttcctagaattcaatgaaaatgaagacacaacatacccaaacttatgggacactttgaaagcagtactaagaggaaagttcatagcactaagtgctcacatgaagaaactagagaatagctacaccagagagttgacatcatagctgaaagctctggaacaaatagaagcaaattcaccccagaggagtagacggccaggaaataatcaaactgagggcagaaatcaataaagtcgaaacaaagaaaacaattcaaagaatcaatgtaacaaagagttggttcttagagaaaatcaacaagatagacaaacccttatccaaactaaccaaaaggcagagagagaaaatgcaaattaacagaatcagaaatgaaaaggggacataataatggacactgaggaaatccagagaatcttcaagtcatactttgaaaacctctactccacaaaattggaaaatttaaaggaaatgggcaattttctggacagatatcacttaccaaaattgaatcaagaacagataaacaacttaaacagagctataacttctaaggaaatagaagcagtcatcaaaagtctcccaaccaaaaaaagcccagggccaaatggcttcagtgcagaattataccagaaattcaaagacgagctaataccaatactcctcaaattgtcccacacaatagaagcagaagggacattggcaaactctttttatgaggctaccttttaccttgatacccaaaccacacaaagacacaactaagaaagagaactacagaccaatatccctcatgaacattgatggatgcaggggtcatgaggtagaaaggctgagtcaggggaagaatagaagaaaggatatgagataggtagggttttatttggagggtggtaggggaggaagggagggagaagggaactggaattgtcatgtaaatcaatcttgtttgtaattcaaataaaaaaactaaaaaaatactcaataaaatactgacaaactgaatccaagaacacatcagaaatatcatccaccataatcaagttggcttcatccccagaatgcagggttggttcaacatttgaaaatccatcaatgtaatccaccatataaacagactgaggaaaaaaaacacatgatcatctcactagatgctgaaaaagcctttgacaaaatccaacaccccttcatgataaaggtcctggcgagatcaggaataacaggaacatacctggacataagaaaatcaatatacagtaagccaacatccaacatcaaactaaatggagagaaactcaaagccattcgtctaaaatcaggaacaagacaaggctgtccactctttccatatctcttcaaaattgtccttgaagttctagctagagcaataagacaacaaaaagagatgaaagggatacaatttggaaaggaagaagtcaatctttcactgtttgcagatgatatgatagtctacataagggatctgaaaaactctaccagggatctcctacagctgataaacaccttcagcaaagtggcaggatacaagattaactcaaaatcagtagccatactatatatggatgataaatgtgctgagaaagaaatcagagaaacatcaccctttacaattgccacaaacaacataaaataccttgggataacgctaaccaaaaaaggtgaaagacctgtatcataagaattttgagtctttaaagaaagaaattaaggaagataccagaaaatggaaggatctcccatgctcttggataggtaatatcaacacagtaaaaatggcaatcttgccaaaagcaatctacagattcaatgcattccccatcaaaatcccagcacaattcttcacaaactttgaaaaaacaattctcaactttatatggaaaaacaaaagacccaggatagccaaaacaaccctgtacaataacagaacttccggaggcatcaccatccctgacttcaagctctattatagagctatagtcctgaaaacagcttggtattggtgatggggaatgtactgtgtatgttcatcttattgattattgaataaagtactgtttggccaatgagacagcaagttagacaggactaggagtcaaagaggattctgggaaacgtagtagagaagtggtcattcaggcaggaagtgacatagcaaggagactcatatttgagcaaggagaaataggaagggtccctttttccctttgcctcctccagtggcgggatatgagccattagcaagaaggaacgccaataaggcatccaataagataagtcttataaaatatataggtttatgatagttaagacttagctaacaggtgagaaatcctagtcattggccaagcagctttgtacctaatatgtctctgtattattttgtccatccacgcggaggaggagaactcagggggctggcagagactgcccacgtggcagtagggcttgggtggctttggcggaaagatttatcataatatattggcacaaaaatagacaggtagatcgatgaaatccagttgaaaaccctgatataaacccgcacacctacaaacacctgattttgacaaagaagctaaacaatacaaagctatacaatggaataaagaaagcatcttcaacaaattgtgctggaataactggattctggcatgtagaagactgcagatagattcatgtctatcatcacacacaaaaccaagtccaaatggatcaaagactggccgggcgttggtggcacacacctttaatcccagcactcaggaggcagaggcagacggatctctgtgagttcgaggccagcgtggtctccagagcgagtgccaggatagtctccaaagctacacagagaaaccctgtctcgaaaaaaacccaaaaaacaaaaaaccaatggctcaaagacctcaacataaatccagccacactgaacttattagaagagaaagtaggaaatacccttgaacgaattggtacagaagaccactttctgaacataacactaatagcgctgacactgagatcaataattaatgggacctcctgaaactgagaagcttctgaaaggcaaaggacacagtcaacaagacaaaacgacaacccacggattgggaaaagatattcactaaccccacatccaacagagtgatgatctccaaagtttacaaagaactcaagaagctagtctccaaaacaccaactaatccaattaaaaagtggggtacagaactaaatagataattctcaatagaggaatctaaaatggctgaaagacacataagaaagtgttcaacatccttagccatcagggaaatgtaaatcaaaacaactctgagataccatcttactcctgtcagaatggctaaattctggctaaaaacaccaatgaaagtttatgctggagaggatgtggagaaagaggaacacttctccactgctggtgggagtgccaactcgtacagccactttggaaatcagtatggcgattcctcaggaaaatgggaatcagtctgccacaagatccagccatttcactcttaggtataccccaaagaagcacattcatacaacaaggacatctcttcaacgatgttcatcgaagcattatttgtaatagccagaacctggaaacaacctagatgcccctcaactgaagaatggatagagaaaatgtggtacatttacacaatggagtactactcattgtgtgtgtgtgtgttggggtggggggaggacacaatggaatcttgaaatttgcaggcaaatggatggaactagaagaaaccatcctgagcaaggtaacccaatcacaaaaagacaaacatggtatgtactcactcatatgcagattttagacatagagtaaaggattaccagcctacaatcgacaccgccagagaagctaggaaacaaggaggaccctaagatagacatacatggtcccccagagaagggcaaagggtcaagatctccttagcaaattgggagcatgggggagggtagagggaactaggagaatgagaaggggagaagaggaggggtgaggaagacatgatggggcagggaggttgagttgggggaagaacagaagagagcaagataagagatcatataatagagggagacattttaggtttaaagagaaatcagtcactagggaaatgtctggagatctacaaagatgacaccaactaacaatctaagcaacagaggagaggctaccttaaatgccctctcctgataatgagattgatgactaattcatatgccatcgtatagccttcatccagcagctggtggaagtagaagcagacacccacagctaaacactgaactgaactggaatccagttgcagagaaggaggacagatgaacataggggtccataccaggctggtgaaacccacagaaacagctgacctgaacaagggggagttcttggtccccagactggtacctgggaaaccagcatgggactgatccacacctcctgaacgtgggtgtcagtgaggagaccttggaaatctatgggccctcttgtaatggatcagtacttatccctagcacaggaatggactctgggagcccatcccacatggagggatactccctgagcctagacacaagggggttggcctagggcctataccaaaggatatgacagactttgaagaccccctaaagaaggcctcatcatccctggggagcagaaagggtatgggatgggtagggtattagttgggggggaggcaggggaggaggggagggaaagggacctgggaataacatgtaaaataatcttctttctagtaaaaaagtccttctttcccacggtccttggtgtgtctgggtgtgtgagcatcactcttcattcaagtaaacacaacatgaagtttaaagctgggacctcaagtctccccaggatcaccgccatacaacatctctgtgtgagttgggcttcttcacgtcatggctactgggtttccaggagacgcacccaagatgagagccagtaaaagctgcattgcctttctcactgttcctcagaagttacatagcctgactcactgtgaagtccaggctgctcctaaatctgtgacccttgtgcctcagctttctgagtgctgggaggcatcctgagcagcctctgccttattctcgttgatagaatttagtcagtaaggtaaaccccacattcaaagggaaggttatcagaccatatctcaatgaaaaagtggcaaagaatttgcagccatgatctgctcattggtctccaacaagctactttatgaatcgtttagctcagttcagatgtttccacagtgttccgtttcccacagctattttttgccactttcctttcactatttcatggtggcaatctgcatattcaaaattgtatttctctcaatattttatggctcctgcatagtaatctttaacgcctcaaatttctgggttaaattgttcaaaatattttaaggttcgaatttgaaacttaagtttgtcttcctgtcaagtgatttccttaacacaaatttgaggaataatatacactcaaagaacggaattgtggtccaaaattaaaaataaaaatagacattcaaaagccaatcaattaaaatgtaaaaattaggctgtgtgaatgtggaaagttgttactgggattttagctatggtattacttaagtgacaagaatttatattttcctgatctaaatgttacttaaattttcattaatttgaaaagagaaaaagtgaagcaaatggtagatggggctttcaatctcttaacggatgtacaatagttcaaaattcttgacagccatttttaatctagaagaggaagggggcagggaaggaaggagggagagagatttgatttggtttcactggcaaacatgtcaatataataaagacatcttgaatgggctagcctcagcatcaggaaagggcaaattggaacagaattatctcttaaataataaccaaaattaaataagagtttggtctttggatgaaggaggactgtgtagacataaaaatgtcaagatgaataatgaagccaaaggaagcggggaacaggaaacacccttaaaggaaggatgtatcaagaaagatccccaagtcccctctcttttgtagatgggccccatgcacagaaaccatgcaagaggaaagggaaggaacagtgactggggattttccaattcattgtggaggtcaagctttgcactatgatgaaatgaaacagccacagagatccacacaaagcataggaggaggcctcctagctactcagtcctcttgcctctaggaaggaccacgtaaccatcagccaagcacccactcctttaaaaactgcaggagtgcatcgagagtgggtgccaggaacaagctcacccaagccaccccagtggcatgtaagaaaaatgcatgtgtggttggccctttgctgaaacaatgtgttccattcatctttcttaataggcaactctttcctgttgtcatttataaactgaaacatctctatttccccgtttctccaaccctcatctaggcagtgctaactcccttgctgtttacatttgcctgaatcacagccatttaaatttcagagctccttgacggttattatgtaacccatggggcactctgactctagaataatgttctattctattttgcactaacaataaccacttgtagggtttttcttccccttgtattagacattgggcaacgatccccagttgtaaaatgctacagactacagtgtaattcagagtgtaaatgacacattcttccttgcatgagagatactcattgtatgtgtattttatctctcttattacctgtgataaacacaatgaccaaaagtaacttgaggaggaaagggtttatctcatcttacatttccacatcacactccatcatctatgaaagtcaagacaggaactcaagacaggaaggagcctggagacaggaactgatgagaggctgtgggtgaatgcagcttgctggcttgctcctcctgacttgtttagtttggtttctcatacacttcaagaccttcggcttgggaacagcactgctcacaaggatctgggccctcctatgtccatcattaatcagaaaatcgcccccatgggcttgcttgcctatagccaagtcttatcgagatattttctcagctgaggttccctcctctcagataacttcagataattgtatcaagttgatagaaatttagccagtacaacatgctaagccttcatgaggccctgggttttcttcacattagtaaaagaatgcctgcgtctgtgtgacaccgactacttccctcctcctctttatcctcctcctcctcctcctctcctccttcctcttcctcctcgctttctaatctcagagagatgtgtgcattttgtcaaggttgttttctttgattttgagccatcataaaatatgagtaaaggaaaggtgatcaacacatttaggaagagagaaaggcaacatcaaaattgctgttgggggagggggggctcacttgcataaaattagaattgtgtcatttggctgggaaagagagcagtggggagacagtcatttctctcattgtcttttgttcacagttgcctttgctatttcatatgtcaccacctaagaggccagcacagagctggacagctgtggttgactgttctttgtgacttccgcttgagcccagagtcgggaggcatggcttgaattgcttttgtcttactctcgagtcatggctttagcatacatctcctgaacaatcatttgtccataatctcacgagacagcactagaccatccccgtctatgcagtgtagcatctcactaagtggctcttgctgggtggacatttgggaagagactgaaaaccaggcaaagtaaacaggtgaaaagttccaagtctgcttttctcttctagtttaatatacatgcaacaattttatgttggtttttatttcatataagcacctctggatctggtaatgactttttagcttgctcttgtgcttgcttccttctgttgtgtgggcattatattgtgtgacacgtatgtctacctgtttgtgttcatgtgtgtgcctgtgtgcctctgtgtgtgtgtgtgtgtgtgtgtgtgtgtgtgtgtgtgtgtgtgtggcaaaaagtcaacactgagtgtcttctttcttttgtcaatcttcaccttattttgcagggaggctctctcattgaatctagagctcgttaatgtaggctgcctggacaatgatctctggggatctatgggtttccatgcttcctgactctgaggttacagaccctgggcactgtgcccagctttaagtgggtgctagggacctgaactcaggtccttgtgcttgtgcagcaaacactttcccaactgagccatctctccagcttcctagctttcttgttcagtgaatgtgggtatcttttctgggtcaactgaagcccacccttgcaaacatacagagctgctggaagtccaggaaatgctgcattcttgtctgtgttgggcaggatttcctgcagagggtcaagaaaacatacttcccaattgtcttagtttaaattgcagaaagttcttgtctccaattggaaaagttgttagttgctgccatgacaacaaaggaagatgggcagaccactctttgaccctgttcacaaactcctaatgatcactttctcaactaaagcaattgagaagcctacatgtttccgaatctgtcccattgcttgccatactgctccagtttacctagtagataaaatggtgcaactggaacaaggagaagcaagaaaagacaaagtgacatgctggaggtctagtctggtcactagtgttcctgctcaagacatccttaccatctgtctccttatgaatgatgaaaaggagtaacggtgtccagcaaaagcaggaggcagagtcagaaataacactgtgtatctcgaagtgacagtctcaatatcttgcctgtcataaataaaatcctaaatgggttagtaagggagagccagcagatggataactgatctagaatgtggtatgccttgttcagggttgaacactgagctggcaacaacaagaatagcaattggagcagtgagctgagggtcttgggtgtgactcaaaagatgagtagagcccaagctctgtccccaacaattagaagctttggcctcctgctgctggtgtctgtgactttagcagtgttgtgtacctactgcctgcctgctccctataggcccattaaggagcttgccctgtggtgatttcacaggttttgtttgtggctatttggaggtggaaatctacagtgaatacccagggccattttctcggtcagtgtttaccagaatgggtccattaggaagttgcctttcaaagccttctttccctgtgtctaagaacaacccatttgccatggatctgagtgcacagtgaaggtcaattccaaccagaataccagggatgaagaaagcttctatcaaggctgagagtgaaagtaagtgatatagaaaactattctcagaagagtggcatgccacttgcctggcttttagagctaacagtagtcatctgttgaacaaacaaaaaggaaatacagttggtcacctgaataagaagctttgaatggtgttacggtagctcagaatctcctaggctagggaagaagggaccttcctgccacatggccactgatagggccctttgatcacattgataggattctctatcaatcactgatgtcagcagaaagaagctgtgtggttagctaccttgaagggcaatggtatgtcaattccagtctggagaaactacataaatataattaagacaggggcttatgttttcattcatgcattgtttcagaaaccctggctaatttagatactgataagttgacacagaaaaaatgcacacacacactctctctcacacacaccacacacactctcacacactcatactcacacacattcacactctcacacacactctcacattcacacacttatttcggaatgttgaatagagtagaaaatgaaacccccatttcagccaagttcacggtgaagccttaaatctgcagcctcctgggctcaggtcaacttaatgttccatgtttgttaagttgaaggtatttggtcccaggtactgcttcaaagtccattgttctctgccaggaagttaattggggaattcagttttggtctctgaagacacacaaaacttataaaaaagaaaacaactaccagacagcatgctataaatgcctgaagataaaagcattgtgattccatttatgtacgtgtgaaacagttaaagctgtgctgccaaaaggctggatagtagcgacccttattgggaggtgagagctagtgttccaagagagacttccgggatgctggcagcattagcttattgatctgggtattggttacaagagaatagtcagtagtaatcatgtgaatttgtgcacataggttgtttgcaagttacatggtgataacattttatttaagcggataggcaatgcagaactgaggtcggaggtaccccatatcagggtatggcctgctttatgaagtgaagttgaagctgggcggagatcgatgggagccctgtgaatcagtggtgcccactcattcctagagcctagaacaattcttggcacataccaggctctcaataaacagttgtcaagaaagtgaatggattgacgagttaaatatgcacattttccaaacaaaggattcagtaacacagttgtgtagatcagacagcagggtgacgcttccatcttgtcatagcctgaacttacctctcagaacacacattacagtaagtcctcctaatgctgcgatgaatttgttcagggctttaaaatgcgtatatgtctgtgagtgaggcttggatcttaaacatcctcgaaggctatgtgataagcggtcctgtcactaggctagacacttttgggaggtgataggcctttaagagatgtgacctatgaaagattagcccactaggagcaagcccttagaggggattgtgggaccacagagccttgtactcatttttgtttgtttcacagccatagtgagctaagtagttttggttcaccacccactgttggcatgaggctctgtatgaccaggcaccaaagtaatggagctaaccggtcatgaactgagacctctgaaactgagataatacaaatcttctcttctttaagttgatggtctcaggtagtctcagtggtggaaagttgaccaacatgtctacctgcctgcttgcacccactgtctctcactttggaccggctttttgtttggtggattccataaaggggcacacccatgtacacatttagaagtgattttcgacatcttacaagcagatgcttgcctcattctcagacctctgtcttcagcctgactctttcactccaacgcctacaatcagggtgagccaagtcctacaaagtatcaacctttggccccggggtctccaacccctacatgagtgtgtctggtgaactcctcagctcccctagagggggcaggagcttctggaggggcttgaacaccagcatgggtctggacagtggctgtttcagggccagtgtgtgtgatggtgatggtgaaccagaagtcgctgtgccccctggagctaggggtggacttcagtatctgggccatgcacactcaggagaaggaaaagatcaagaccctcaacaagaaggtcacctccttcacccttggggggtggttcttttagcagcaggacaagatactagaaaacaagtggggcctcctgcagcagaggaaagtggcttggagcaatacggataacaaatgtaaaagctacatcaatagcagttggacaccttgggacagaagaagctgaagatggaggtggagcttggtaacatgctggtctggtagaaaactctaagaattagtagaaggatgagatcaaccacatagagatgggaaatgaactcgtccccattgaaaaagataaggatgaggcccacacagacaaaatggagctggagtctgggctgtaaatgataatgagatccatgaagaagagatccgtatgctgcagtctcagatcttggaaatggctgtttctgtctgcagacaacagctgctacctgaacacagatgacatcatggtcaaagtccatgcccagtgtgaggagatcccaatggtaagtagctaggctgtgtctgacagcatgtaccaggtcaaatctgaggctcagaagacactggctgggaagcacgggggtaacttaagggttcgccacagtggatcatcagtcatttgcaagcagagatcaaggccctccaaggccatgtctgaaggcttccattactgatgctaagcaggatgtggcgtgctggtcattaagtctgaccaagttagaggctacctgacaataggccaagcaggccattgcccagaagctgcataagtactatgagctcttgaacttcaagctggttacagaccctgagatcaccacctattgcaaacttctggaggccaagagagctggaggtgcagaaattgggattccatatgaagatcattgatggttactcaggagggtcaagctctgtctacaggggcctcaggagaccagtctccagtgtgagatctgtgcatcctactttcagttctgctggaagctctatcatcccaaggccatggttatgaagatgattgagagagagaaagagagtcacaacaggcacctaatctttgatgtcctctccaaacgaagggttatggcaggccctccaagcctgttttcccctgcatctatcctccagccttggagcctgtggaggagacagctctttggatgagtgcagaagacaaggggctcagccaacctttgagaggggtctcctgcctgggatacccctcaggaccatgtcttcaccaaatcccaatttagttgtctcttctaaaataaagctgcagttggctttgccaccccatctcccaaagtggtattttaaggtcagctatgacagtatttatatttatatttcccatgtttgggaaactatgacagaaaaatggccaatttgaggccagtttgtgctatataacgaattccagattagccctgtcacaaacaagagaatcttttaaggattttgattttgtttttgtttgtgaatgtgtaatgggtgtgtatgtgagcacatgggcatctccacagcacaggtgtgaaggttggagagcctcaggcctgtctttgtcttctctcttgtttgaggtggggtatctttgttgtttcctccagaatatgactgtctatctacctccaaagctcctggggactctcctatctccatcttttgcttccccaagggagggctgggatttcagatgtctctctatgtgcatagctttctacatggattctggggatccatgctcaaactctaatgcttgcacagtgagtcttttacctactgagctatcttctccaggccaaaaacatgacatttggagacaggtgttggcttaaaatgaggacggtacaccaattccttcattcttttaatttctaatcaaaattttctggaaggattaaattagcacgagaatgttgattaatgcgtatggtcagagtgaagggagtgagatgatcttggatacgcatatcggcatcttctgtgcatataacaatgtgatagagagcatagacagtggtttgcggttatttcgtgaaattcattttaatgttttcatgctacagatgagttaaccaaggtttgggggggtgtaaccgatagtgctgataccatggatgcaagtaaatacacagttaccagtgcttacagaatcaatgtgttagtaagacacatagaatctgaactcaggcacactggttccaaattcatcaatctggagtttggacatggcaggcaagacttgctcagcaggtcaaggacccttccctggctggtggtagagaaaagtgaataagctattttttccccatgcatgcacttaattcattttgtcaacaaaattaataagcatatatcatgaagatggtactgcctattaattaccctgggattcagataggtggtatgcaaggcagaaagaagaatttctgctttttcttgttgcgtttgttttattgtttttgagacagggtttctctgtgtaacagtcctggctgtcctggaacttgcattgtagaccaggctggccttgaactcagagatctgcctcccaagtgctgggcttaaaggtgcatgccatcgctaccctggctgaaaaatttctaccttacatggttattatgagaagccactgactctggcagggacacaggaattcagtttagtggagaaaggataagaaaacaaatgaatacagtaggattgattgggtattcatgagtaagccctagaaaaatatcattttaaagaatttcacctcagttaactttgataatgattttcctgtaaaaattgtgcccaggggctgagggaatggctcaattggcaaagttcttgtcgtgtaagcatgagtttctgagttctctaaataaaatctgggcatggtggtgcccatctgtaagctctgtgtactgagggcatgaagaagcagagacaggaggatttctggggctcactggctagccaccctgctgaatctctgaaccaggctcatcaagagattcaaaaataaagtagagatagattgaggaacaagtgtactcacccacacaaacacatacatacaccatgtacaaacatataccacatacacacaaaaataaaaaataaaaatggcgtcatttcaattcaaatatgcaggtggtaagggacacaattctgcgtagtcacggaaggcgagaccactcactcagcattaccatggtttgcgaaacctctgcagacaggaatgaagagaagggaagctcgacatctactttttccataggctggtatacagctgggaaactgtcatgaaaaagaaccaaggtgtctgtgtctttgtctctgcattcatgagaatcataggctacaaagccacagtgttctcttgtagcccagaccctcccagtagaaacaggaatctgacaaaaccattcgtcttctcagcgtgtcaggcaaggtagatatttctggttggaacgttaccaaaacacagctttgcttcaacacacacacacacacacacacacacacaaactttgtttttgtacatctctcaaagctgcttataatattcctcaggaaagggatccacacacaatgttgaaaccacatgtcttggaaacgagtcaaaagatttatagcttggattggagcaaaagtattaaaatagcgtctctatcaaccatagccatccactccaagatcacacatgctctttcggtccatgggtgaaggtcatgcaggggttggctaacaagccattttccttgcagataattatggacaccttccaatacattgaggctttggttttcacccatcagatgcacactgatattagcagaaattcctacttcataaattcaatttggaaagatcaaaggccttggacacctctaaaaccatagtagactgttctaatcagacatctgacataggtacaaaatcttaatactcactgatgtacgaagtacatgctacatttagctttgatatatctggtttattttcttggtaaataaaatgccacaatataccatcatgttcaaatacccttgacaccagtgcatgatcacctctaggacttgaccaacaattttgaaatcatgtccattgctgctgaccatctgttaatttcatcagcaccagagatttgagctatccatattaactagctaagagactttttattaagggcacaaaagagagtgtgattttttttttattcatcctcttaagtataatgaccttcaacatggtaagtttaaagtttggacttcaacagaaagcatttggggattgggagatggctcagttgggaaagtgcttgcatgcataaggacctgaattcaacctgtagacccaagtaaaaagctgggcatagtggcatcagcttgtaatcccagtattttgaaggtagagacaggtggatacctggccagtcttcttagtgaaatctaggtcattaaaaaccctgtctcaaaaaaatatatggacaacatccgaggaatgatacccgaggttgccctctgacctccacaagcatgcacacatatgtgcaccacttaatactcatgagcacgtacacaaactcacatacactaatactcacaaaagaaaacattttgttgtccttttcaaaaagtcactgagaaagaaagaaagagatgtttatcccagaacatggcactatgctaagcacagctgtgctgtggcaaagcacctgagctatttggcttaagaagaaaggtctgttttgattcatagtttcaaaggttcagacactgacactaccaagaattccccacttcataaactcctattggaaacctcaaagaccatgggcattccccaaatcatagagtctaccagccatatgtctgacatgggcacaaatattttattctattataatgatgtcagtctttccattcaaagtctgatcattgtgatcacgggtgttgtcactctgaaggaagagggcagtcagttgggtaaatatgttctacttcgtaggttgaagttaaaagtgccaaacctgatttaaatctttgaaggaaaacaatttctcgtatggttggcaacagccgaactcctaacatccctgaatattcatttcatagacatttaattcagtatatagtcatattcatttgtgttgatttgtactagctttcatttctttcttgtttaaattttttgtgtgtttgtgggcatgttcacatatgtgtccatgcccatgtatatgcatgcatgtgtgggtgtgtacccaagtgaaaatgtgtgtgaagagcagaggtcaaccttgggtgtggatccttaacgattctcctttttaaaatttttaaaaatattttgtgtgtatgcgtgcatgtaggtgtcatggtctgagtgtggaggttgaactatttgtgggagtcagttctcttcttccatcatgtgggttctaggagttgaactgcagacatcagccttggcagcaagcactctgacctactgagcaagctcactgaccccagcgcttctcttttgagactggatgtcctagtgtgctttctgtccttgtgatgcaacattgacaaaaacaacttggggagaaaagggcctatttcagcttgcagtttacagcccatcatcagaggacgccaaggcaggaactcaaggcagaaaccaaagcaaagaccatggagaaacactgcttactgactggcttcctctgctcactcccatctagttttctcatacaatccaagatcaccggcctagggatggcattgcccatagtggggttggcactcccacaccaatcattaatcaagataatgtccccacagatatacactcagaacaatctgatggaggcaattcttcacttgaagctttctcttcacaggtatatcaaattgacaaccaagattatctaccataagtgcagacaatggcttttccagctcagagttcccaaatcttccattttcctcccaaaaaacaatccaaagcataacagcccatggtcagattcatcacagccacaactcacttctaccaaaagcaacacatggaagaaatagttattcgggcttagggttctggagagagttcataagctgcagggaggcatggcagcagatggccatagcaggaagctgagagatcacctctccaacggcaaacaggatgcagagatatcaaactagcagcaggaggaatctatgaattctcaaaggccacctccagcaaggcctcactttctaaaggttccatgatcccctccaaacagctccacccactggactcagtgtttgaataaatgagcccattggggacatttcttcttctagccaccacacaaggtctctcactggtctacaagttgccaaataaggtaggtttgccatccagtgaactccaggaatcccagcatctcagcctcctctgccctgggattacaagtgtttgccgccatatccagctttttatgtggatgctggcattcatggactagacacacttacgacctttgtctcatgactcagcatcatgggaaattcctaactgctttaaggttgtctaattcagcctgacactcagttaggggtagagttggcctagagtcactgagattaagattcagggtcatcaagatggtgagagatcactgactcaggtctgacaaatggggaatctgcataagaccaaactagactcccttaatataggtgacaatggtgtgactgggacaatatatgaggccactggcagtgggtccaagacctaaccctaatgcacaaactgactcagtggagcccattctatatggagagataacatgccacaggggtgtgggggtggagaggagccttggtcctgtctcaactagatgatgggacagacttagtagacttcccatgggaggcctcacccttcttggaggagcagataggaggagggggcagtgaagggagtgggatgaaagaagggagggggaactgggattggaatgtaaaatataaattaatttttaaaaagatttgaggtaaggatttcggagatacaatttttaagtgtaaaatacaaatttttttctagatgtgaggtaaatattctgtagtctttatatgtgactgaaaggtttttatatttagtttggctttacagctagcttccagccttttattatcatcagagaacagtcagtgttaacttgggaccatgaacttattgcctgggggtcttccccactcttagcttcattgctgttgtccatttagtttcttgtgagaacaatacattgatcaaaaatggagatgctttaaaacttcaggtttttctattactgttgtctaagttattaaatgtaaaagaatattaccatactcattaaattctaaaagttagtaataaaagcctaaggtagaatatcgacttttttttgagagaaggtttttgttatacagcctaggatagccttgaagtcatgaccctctggcctcatcttttcaagcagaattgagggactcttggggagcaagactgaagtgctaagcagtctgtttcactttctttgaggctgtactttcattcttctacagccattttcttcttcaccttgctttgaattttagagggttttcccattatctgtgtgtcctagaatcagagtcactgattccaagtagagaactcagaattaacaggtaagaatgccacttgatgcttccaagacaaatgaccacagacttagccacttaaaacacatttattaacttgctgttgtggaagattggagactggggtacatcttgctgggccaatgtcttagtgtccaaagggctgagtttattcctggcgtctgaaagctgttttgctgtccttttatggtttttagaggtctctgcatcccttgcttatggcccctcctctattctcaaagccaagaacttgaattggggtcctgtcctgttccatccttctgtctattattcccctccattttgctctgtttttcagcctccctcctcagttctaagaactctcgtgattattctgccaggccaccttgatatttagtccatgacaagaccgtcacatctacagtctttcttgccatataaggtcacgtgcccatgggagtttaggatgcagacagacatttgttctgtttatcaaaatatccttggaactgtgtaaaaggtaatgttcctatgcttgggatggcagaaaacttagacagtagatgcagggttcttagtttgatccccagggtcccaaaacagtagcagtgttcttcggggcatggtgaattcttcctcttgaaaaaaaaacatggcgttttgtcagttacaggaagcaagtggatttccctaaaactgtgcccagaatattgagtagacagaaacagcaaccaacagtagaagcacttacttctctggccaagaccttcctgataaacctgatcatgaaaaggacagagaatccacagctcatgagcaactctgtctagcagaaactgtgtttcccagagtccccactactctattttaaggttccatgaggtatttagcattagtcctgtaagagtcactgttacatttagaagactttatttttaagaatatttgatccttagggaagaaatgtatgtcctaaatttgctacacttgaaaagaaccaaagggcagccaagatttctttccatttggcattattctagtctctcctcccaagaggcagacacttcatggatccacattttagattttgttaaccactttctccccaacaatcattggttttagatttcagcaagcagaacactttgaaatcatgctttaaaaacaacaacaaaccctctaatccttgtcatacatcttctccagagcttccctttctctcattcttttttccttcccctcctccttccttctccccccccctttttttgacagttacaggggcttgaacctagggcatcgtgtatactaagccactgagcagtacccccagtctgaaattcctgtttttttttattttcataatttatgtttggtattgtgtagaattgggttggttacaaaactctgacagtgtgggctctgctccctaatttaatacctttgtgagattcatcctgtttcgatcaaaaggaaaactagatgcaaacaaaatagctgccattaccaagggcatgtatttaattggtcagcagcttctgttaaacaagacattccacgtgtgaatttaatacacacgaaaatgctacctggcattccaaacttgaaatgagagaaagagtgtccttttgagctccttagagaggaaccaagcctcaagtgagtaaaggaagatttatttctctgctgggcaaatggcacagaattccttttgatggtagacctacttccaacacagaaagagacctagtgtccgaaaactctgcccttgatcatggatgcattcaaagtcacagtaagaatgaatgtaagacacgtgccgcccacatttccctctctctcaaagcatcttggagaaatgagaaggaaagacacagtagttttttcagccctacaggtggttctagttactcaatatgtatgtctaattgctcagatgttacctgagcagttcggagagcagtatggtaaagtctcttcatccccccctcccccccaaggttgcctacactttcttcagcaaacggcccccttttctgcatgcaaaagctgaggtgtgccctgttgctgtctcaccctttgccacgtagtctcaagaagccggggctgacaagcatagcagtggggggtggggtgggagagggaccgccaccagctgttgctaataaaacaactgcagccctgcctcagtagcttcccctgacttcacatccctgtggtgttggcagtaattgggaggggagttaagggagcattcctctctccggggagacagtaagaatattaatattaatgtgattttctgttccctcagatgggaaaggataggataaaatgttttaaaggaggccgatcaatcattccaattctggcaagaaaatgatgcctttgcgtttaaggaagaaaaaaaataaaacatctgcctggaatcaggggtagtttttttttttttttttccaaaaaggggtgtgtgtgtgtgtggcaatcccaaattcacctctatgatggaataagcatttggcccttctgagacctttggtcccacgggggagaaagtaaaactttgaaatgcattccttgaaaaaccatcgcttgtgtttctgctctccctctgtgttctactgcctcgctgagttattacccgagcccgtgagggcatctggggtggtcgtcggtggtcagacaccgaggacagagtggatgctctgagaccctttctgacccggtgaacccacatctgccccagccaagcactttctgatttctggacagcttgggaagtgtctgtaaccacgagcccttgggagccatgaggactcagagccccgcctttcaacgtctgggaggttgctgctggcctgtgatcagggcaccagcgaggctgcacaaaagactttggaggtgggcagatagacatgggtttctcaagacttgaaaggtttcaaggttttgttcctggaagtacaagtggagccttgtgtgggagacaaagatgtgtgggcttggggagggggtagggacagtctgatcctttttctgtcctccagctgaatagtgacgggcccagcatggagacatttgtgacctccatcccccttgccagatgccagacggccattagttaaccagagaggcgacctttctagtgacattccgccacccgttcactccccctgaggaggctttgggcgtcagagctggagtcgcagcctgagcaaggtgcagctcagtggagcacaataagttcacagaacaagtttggggaagcacaggaaggccgaagcgccaactctaaggcagaatgaggaggaggcatgcattcagtcaggcttttctgtctagtgggagttttaaaagatcatcgtgagagcccaaggggatggctcgtttttcctgaagagcattcacgcacatgctgtctgtccatcctccagttctcatatttgtatgtgattccttaattatcaagaccccttctgagacttcaatgatgagactcatcctgggtatcccaacctggtttccctcattctccactgtccatctccactgttcatgttctattcttgaggaaaatttaaatcggcattgacctcattgagacggccttgatctgagtgatgttgacatctctgtcgtttagagggacttttattttctccatcgggatgtcacctccatactgccactgaagcctcacctgaactggccctgcatatcaaaagtttctgataagttttcaacttaatgagtgaacagagagagctccattgttcatctactaagatcacagatcccaagaagatcatacagtgccccaagacagaaagctggcctcatttaagtggactgataaatacctgctatgtgtctaaggctcattaccattgttccatttctggaccacatgcaggtgaggtgtctcagaacccctcctgggaacacgcatccctacacgtggtttctaaagaaaccttattctactctttagtacattatgttattgctatggaaacgacgatattttaaagaagaacactggaactttccaaatacagtatttattcttctgctgctagcaaaataatgtgtttcgcctaagaacttgttaggtggcctgcagctaaatataaaaagacagattcttgttgtgtatgagtctatgggaaaatttggaccaccagcttttcaggatacatgtgaaaataaactccctgcaaaaattctagacgtaattggggccttcaatgaagcacttaatatgttagattttctctttgagttacagaagcaatttaaatgtggaccctggaaacaccctctgcaggttccaagctggtggtggccctggggtttcagagtgtcaatgttgctcattactttcatacctctgatccagtggccccagctttcctgggccgatgtcttatttaatcaagctgttaggggcacagtatgaatttttaggctgaaaggaacagaacaggactgcctgagtgtcgccaaggggctgctcaactctgatgtgcacacttcactttcaacattagcagagaacatccacggacagcctcgccctccttggtggtgttagtgagttcgtgtgtttgtggtgctggggactgagcccagggactggcacacaatagatgagccacacccccaacctcctgatctttacagcacactttggcattaaataactcatgtggcttgagtcttcaatgccctcctcgccctctgccgaggcccctgtactggggcttggtcctcagcttggccttctgggagatggcagctgctgaggtggggcctagcaggatgcctttaggtcaggtgaaggcatgccctcaagcacactgtaggaccctggtgtcttcctctcttctctctcattggaggtatgtcccctcgacactccagcttcaccgagttctccatccttttcaaaaaattgtttcacttttttattatgaggattatgggattggggttggaagttatatgacaactttcaggacttgagtctctcttcccaccatgggttctggggatcaaactcaggctccttgggcttttgctgcaagcccctctatctgctgagccatcttgctagcctgagttccccattttattgggctgccttaaaacaggcttagtaaacaagactttctctttttccctgttgctgtaaaatagccatcacacttccccctgtccttcctaaaatgcaaggtggggttgtttgtttgtttgtttatgctcagcagcgggaggggtgtcgaccatgtttccacagacatagttcacttcagcagatgtttctcccactagtagtttagtttgggtatagcataagagctcatttgacaaaacctgtcagttgttcacattcttacagttgaggggagtcaggagtggtgacacaagcctgtgaaggtttacattctggagcactctgggctttcaggttagaagtgatctgataattcactgaataacaccatgctgcatgctaccctgatgtcataattgagaaaacaacaaaccttctggttggccgtgtggtgtgtagacccagagtcttctctggccttgccggtggacccaaatccagcacagcagtgtctcacgttgatccccagagtttttctacacacggcactctaggtggcctctatcaggcaaagggagttggtttattggtttaaatctgttcatcttcccagagttagaagatttccccaagtttggatttcattaaagatacatttgcgtttacacagaagaacaaaaaaatgtttctttggatactttcacactcactttagaaagtcagtgaaaatgtacttagtttccatttttaattgggccagacataattaaattcccagtacaataagtctagaggaaatcatatccatgtaattctccaaagctttgctcaaaaccaccatgaggcccatccctttcagtcactgtatccatccatccccccctgcccccccccccgcccccgtgcccttcagcaagcttcctcttcctccatcttactctctctgtctcccagatcttttcttggctggattctctgaggaagtcccccatactgtctggctccagtatacattcataatctctggtttatgctgctctgtgatctgtccccatccccagaactggcccttcacccagcctcccatccttcacccagcctctgaatattcttcgtggtttttttttttttttttttttttttgtctcatccctccagcttctttaactcagcaggtggcaacctgtcacagagaattcagatgaccttagctgaagtcagtcacctctgcctgcagcctgcagcctgccagtgcttcggtgtctcccttctcttggctctgtgtctttcatctgatacagtactctgtgctgttattttcccacccctctcctaacacacccttatgacctacctttgaatgaattcttttacagattgacatgagatcaagagtatgacaatgtcccacatggtgctacactcccataatcccaatattggaaggtagagaggcaggaggattaggagttcaaggccagcctcagttcatgtggaattacctaggttcccagagaccctgcctcaagaagcaaacaaccaactgcaacaaggagcacagctcacagaaaccagctaggcaacaagcaacaagcaaacaggaaggcagcatccaggccttccaaagatcctggagcttcatgtaagcctctgtgcttcacccctctcctgtgtgtctttgcgcttactctgtctacgtggggcataatcctacctatttctgtaattgcaaatcctgccctccttttaagacccaagtcgatcgtgtttccctcctgataatccaaacacacgcagtcctccgtctggtagcatacatgcatccttctcacctctttcctctctgtgttgtaagtctccgtacagcttgtcttattacttctggaaagtgaggaaggttggaatccgggtcaggtgcatgcaattgtgtaagctgtatgtctgtgggcgtggctattttgttcgggtaacaaaactgtgtttcaaaaggctccatgatgttttctaaatcataaagccttaagtgtcatttgaatgtccttttaactcctgcacacaatcctatattctccagatcttttttttcaattcggtcacaataataccatttttatggtatatagcaagtctcgttgggtaccagttttctgaaggcattttaagcacatgtatttcatgatgcagagtaggagctaaatcagtgttgactgaatgagcgattgcgttttggctgatgctatcaggaaagcttggttttgttaggggaaaaatatgaagattttgctaagtgtggtggcacacagccacaagcccagttccctggaggctgacatattcaggatgcaagttctaatccatcctgggttacttgaagcaaattccaggctagcctaggttacacacacacgcacacacacacacacacagagagagagagagagagagagagagagagagagagagagagagaaggcaaaagaggaaagaaggggaggagaggggaaaggggtgaggaggaagaaaatttgaagtgttttgattagaagaaacacttgtttttcagttctggggatggagcgcagggctccactcatgccaggcaaatgcatttctactgaactaaagccccagcccacatagtcagctccctgccagcattgcagttcccacaacccagcatgcactgctctagacctcaggaatgaagatctgtgaagagtagaggtttcttatcccaaccatgtgactccataatcatattctctctgtggtctctctctctctctctctctctctctctctctctctctctctctgtgtgtgtgtgtgtgtgtgtgtgtgtgtgtgtcagtctgtctctgtctctctctgtgtgtgcacatgtatagattatataggtgagtacatgtgtgcacatgtgtgtggagaccaaaggtcaaccttgagtctcctggttttttgcttttttttttttttttttttttttttgagcaggtgtctctcactagtcagaactcagggattattatggccagcctgaaagcctaagggagcctcctatctctgcctttccaggcccagaattgtaagtttgtatttttgtgtggcttctgtggtgatttcaggtagtcacatctcaaggcaaacacttccttgtcccagcccctaacacattctctttgttgtgctttatgttcaggattttggcaaattagcatattttttagattatagtgtaaacatttgttctcaaattctagctgccaagttctgattctcatggtcagagttaaaccttttttttttttccagtcatagaagctatgagatgttttctttgcattcccaaagatttatcccggcaagcatctcattgagacagaggaccaagtctagatgattaaggaaaactggtcagaaacattctgtcatttcctttgtttaggatgacatggaatatataaactccaatatgcatccagttggggacagttctactgcagagggtttaggttcctttcttattcattatgggatatgcaataattgatgcttacctatttaatttgacaatgataggatgatgcagaaatctccaggtaccacaggaatcttcaggtcaatgcacaacccctgggcaataagtgacttgaaagtgttgagggatgcaggcttgatcatctcagggcacactgtggttcttaatagagccagagaaaacaatcacctggacccagaagagtctactacccaggagtgtggggactcttgtgtattttaaaggggttagtagccaccacagattatcacactcatacgaggaaaggaaggcattagcctccagcagacttttccaggaaatctaatgggagctgtgagcacacaaaggtagacttaaagatgcactagacaatgcagcacctctaagtgcacaagttgaaattggatgtatttgtattttgtttctgtcccagttaggcttctgttactgtgataaaaacaccaactgaacagcttggggaggagtgtggcgcatacctccccatgatagtccaccattggaggatgtcatggaagcaattcaaatagaaacagaggaaggaatctttgaagagagctgcttgctcctcatgcttgctcagcttgctttcttacacaacccaggaccaccttcccagggtgggcactgcccacagtggactgtgacctctcacaccagtcagtaattaagaaagtgctccacagatgtgcccacagaccaatatgatggaggcaattcttcaactgaggttccctcttcccatgtgaccctttctgagggagacaataactcagttgaggttccctcttcccaggtgacctggttcattgtcaagttaacaataaccagcgcaatatttgcacaaaggagccatgggactgaatacaaaggttaaaatacacccccattgctttagtcaagtgaacagactttgtatctaacaggggcctgcagacatcactgagggaggattgtgcatggaaatgaggagccagtgacaacgccggtttacagctacctaacacaacttgtctccccagaatggatattttaatctctaatttattaaaagatgaaatgttggaatgttagagagattgaaatcatttgtcagatcacgaagtcctcaaaacatttctcagccttaataacacatctgctcttagaatgtggtctcttggtaatagctgtctgaaagtgtctgaatttagggattatttgagacaacagatttccttctatttggaattgaatgaggcatctgctccctcccctgctagctttgtgcgatagtctcaaggcattcataaaaggccagatcgtttctgaacattatgagaaagaaaaaaagacccctgtcgatggtgcagaatcagaaagaggaattaagaacctttaaatgtagtggttaatgtttagagatcttattctgtagtttgttctatgatctgggaggcctattgtagctcctaccaaagaagggacgtggtattccaaaaccaacagttgagggaaatttttgatagaaacctcagtagacatacacattttctctcatttcatccactacaaccaacagaactcagtggaaatgggcctctctgatcattccaaagaacatatgccaaattaatgcccaactgaaagatgagactacacgaagtgaaaatccacacttaacaaattgtactctcgagctcacttcccagagagcatctcctaaaagacgaaccatcaccagcttccaggatctctaagaacaaacgcaatgaacacagagcaatgcaaggcagagctcaggcacatttaaaggcacttaattgatgggaaagtctggcataacttgttggctgcaggtacttgttcaaaatcaacatttaactatctggggaaatattccattggtaaagtgcttgctgctcacaagcatgaggaactgagcttgattttccaacacccatgaaaaagctgtgcttggtagccatgcttataaacccagcagtgggagggtagaggcaggcagatccccgagtttccctggccagccttgtcatgtcagcaagccccgatactcctgaagacacggtgtctcacaaaacaatgacaattcctaagaaacaacagccaggattggatccaggaaaagaggagcacggccaagagaccaccacgtggcataagatctgaagacctaaggcaaaagggtcccccaggggaagctgatcactggcaggcaggcagcaaatgtataatagaaggccagcaagtaaggacaccctggaaaaactgagcaatcggacgggtgttccacacctgcttattctaaacaaccactgccgtcctgtatgggcagcgaccttccaggacccatcgctacacttcattatcagactcatgcttgcaaagcgctgccgtctgggaggctagctcatcgttatgtttgttctgtgtgtatattcgtccatgtacatggactgatttagaggaagagtggctttacaagcaacaaagttgccgtctgtgaagctatctgcaccatgacaagatgcacaatttcaaaattcagaatgagttggtccgatgaaaaatgttcttgtgtgtgtgcacgcggacttatgttcatgtcggggtggctgtgcatgtatattcatgggaaggtcagatgtcaatactgggtgttgtttcttaggagctgccttctttgttttgtgaggcggggtgtctcacaaggatctgggacagggtgtctcactaggatctggacagggagtctcactaggatctggacagggagtctcactaggatctggggcagggagtctcactaggatctgggacagggtatctcactaggatctggacagggagtctcactaggatctggacagggagtctcactaggatctggggcagggtgtctcactaggatctggacagggagtctcactaggatctggacagggagtctcactaggatctggggcagggtgtctcactaggatctggacagggagtctcactaggatctggggcagggtgtctcactaggatctggacagggagtctcactaggatctggggcttgcattggaatatccacagccacatccagggcagtttggctctaaatgtggccttttccagttctccctaaagctggaaagtaccactggcatttaatgaggagcagagggaggaggaggtggggagaggagcaagagccgaaactgttctatgggaacacagatgggtgactgctatggcaaaatgcagacagcaccacactcctgagaaacagccttgagcctcttgcttccactgggggtgagtctcctacatattcacaaggcagcctcccttcctacccgggcatctgtcttatctcctcctttagtgctctcctgacccatcatgccggctgctactaaagggcttctgatggacagttcctgctgacatccacccagaaacctggcaactgtcatcttctgcttgtccttcctcttttatatacccaagtgcttgggctctgcaggtctgttcacctacagcgtctttggatgtggtttctttatcaggatcacagttggtccttggtacctcacatctagccacaaaaagcctctctaagcaatgcacctttcatcccatggagcatcccccttcttgggaatccatgtggcaaatcccaccggttgtcatcatgacccctccttccatcctcgatgatctccctatccttccccattccacttttcatccagttgaagatcttgtctgttgtgttttctcctccagtgtttttgacacaggtcttactatcccaaggctggcacctgctgtgggatgtctttctgtatgctgtgaatatgtgttgctctcattggttgataaataatgctgctttggcatatggcaaggcaggctagagcaaggtgggaagtccaagcagagatacaggagaagtgcagagtctgggagatgccagccagccactgaagcaagacatatagaaaatgaggtaacatgtcatgaaccacgtgacaaagcacagataagaaatatgggttcatttaaatgtaagagctagtaagtgataagcctgagccattggtcaagcatttataattaatgtaagcctctgagtgattatttggaagtggctgcaggactgagcgggccagagaaaagcctctgtttccaggcacctaactacaaccatgctgcttcagcctccccagttctgggattacaaacaacacacacacacacacacacacacacacacacacacacacacacacacaccaaaaaaaaaaaaaaaaaaaaaaaaaaacagaagagccaggcatggccaggcttggcttcacttgctatgcatgcgttcccacttagacaacgctttgttggatagaaaccccagtcagccgtcagtggctgtcctggtggactgtgggtgccatgtctaaggatggagtctggaggagggagcacggttagtacaaaagctgcactggggaggtcctgacagagatattggcctcaaaacacaagtggcagcaaacaatgagactaacctgagtgtggtggtgcatgtagataatcccagcactcacaagtctgaggcaggaggatttgtcacaagcccgaagtcagcctgggctacacagtgagttctagactagcttgggctacagtgtgacatcctatttcaaaagcagcagcagcagcaacaacacacacatacacagagagacagagatagacaaagagacaaatagactaatggatggatagagggcgggaggaaaggagagaatatgagaccaaagtatctatttttaaagcgcaggaactttacttcttttcttcttttccttttcctgagatgtagcccagtgtaccctggaattctccatatccttgcctctgtattttcagggctggcattagaggcatgagcttccatgcccagctgccttcattgttcagcatccccttctctagaccttctaccccaacctagcccatctcccccaacagaattgtctgaatttgcatattttgttaacctcttcccagccacctctgctactcagactctcaggggagcctgggggaaaagaaaaatgagaatattaattgtatctttctttaacactgtggcagttaactcattattattattgttattagttgtaatttgaaaactactgcattaaataatctttttcttaatgcctgagtgtttagtgacctttctaagttttacctgggagactggcggttcctgccccctgtgcactcctctgtgacttcctcgcctttcgttctgctcctccagagaggagccgctggagactccatgtggaccacacccttgaaatccatttccagcaccgacctcacacttgtctgctgttgggatttttgtggtctgctgtggggtcctgtggggtctttgccacaggatctctctgggctctgcaagtttgtggtgtttgatcctctccacaaccaagactcccatgctactctcttcagtggagggaaagagaccctctagccactagatgctcaataaagatccacggtaattccagaacacaagtgctgcttgtgtctaaacctaagctaagttatcaagagtcagtaacaacccggcaatgttagagacatggcgaaacaactcagatagcctttgctttggatgtagctgagcacttccttaccaagcatggaaatcatcttcgaaataaaccctagctatgcaaagatgtgggaagtatatagctaggaagttcacagggtgttaggcgggtcagtggtggcttggtgataagtccgggcagcgcttgacttgtgctgaacagccactttcaccactgccatttgtcgctgtggaggacactctctatccacacagcctgccctttcatagtgaaaaagagtaggtactgttcctccctgctcagtgcgaaacacacagctatcagataacaaggttcagtattcctgaagcatgtggcagaataaattagtttcatctcgttacaggatggaaatataccctgtagaaagacaggcagatgtgaacccaaaggcaactcttcgggggctgaacaggacctgctgataccgtctggaaagccagcgggtcaagcatttggacccttagacttcaggcttctggaagttccggtctctgctcctccctggcagcactgaactgagttctgctgtccagagagtgggcagctgggaatctgggtcaaacctgcttcttttctcctctgtgtccttttctgtctccttcctcactcactcccttccagccactcctttttcctttcccaacaaaatcccctgccttatccctaagatgaacaacagcctccacagcacaagagtaaatatgaagcaaaaggtttttgtggcaataaactgttcctctgtgtgtataccctgctagatcatttctgtgtatttgtggggttttgtttgtttttgtttttgtttttgtgcagggcaaacacacactttatacataggctgttcttctaaaatgaaataatctctctgagatttggttactttgaacgctaaatgggtcaatacaaaatatattttcagtgtatcatggatcttgaatgtcccagaagcccatttgttcaagggctgatccctggtatgatctctggagctgatggaacctttagaacttggagctcagtgggagatcattgggtgattgagggtgtgtccatgaagggaacgtggaccccagcccattcctgtttcttctaggtctctttttctttctggccatcatgaaagatgggccccctctcacacatgcacccaccaagctttactgtgaagccagaggtacaaagtaccagggccaagacaccatagactaaaaccaagacccaaaacaaatctttccatcctcaaagctagttctgtcgggtgggttttttttccttttcctccttccttcgttccatcctttatttctacaggaataaaaagctaatgaatacacattttcaacaagagaaagatagagtagtgatgacatctgagtgtcctgctgggattcactcaaccacgctgttctaacgggaagattacagataacgactgggtgatcaagggtctgggggcagggatcagcagtgaagagccagtgctgctcctgcagaggacccaactttggtctccagcacccatatcgggcagctcacaaccacctgtaactccaacttcaggggaatcttatgtctctatcttcccctagtgcgtgcgcgcacacacacacacacacacacacacacacacaaatacaagaaatactctttaaaaaaaggagatgagatacgttagggccatgaaggatgttggggtgcagaggaggctccccatggctcactggttggctctgtcttctcccagcaaggcctctctttgcactgtcagcttattgaaagtactgtcatcaacagaacacctagtataagcatttcattcactggacaaaagatctcctatgttaaaaagtaacagatgaacattcttaacaccatcaatatctgaaaagcccagaaaggcttttgaaaatcattatctacttctccaaacaatgccttacatcttctgacccacacacaagcacgtttaaggataccatagtgaagcagggacaatagtgtgcagagctcaaatggttgcaagaacacaattggaatgtatcctatagaaatataaataatattcataaaggaaaataaaggggggagagtgaagggtcaacccaaaaaggtgacaaaacagttccagaagtgtgaagaagacggaagggggtgtgttagttacctgtggctgctgtagcagtttgctcaatgatttaatggcttaatgcgacagggatgtatagaatgtgaatccttaggctgaaatcaaagcatcacacattctccaagggactaaaggactctccttccctccactcatcgtcttgtagttgtgtccttccagcctgccttgggaatccactgcatcaccctcttctgcctgtgttagacctcactctgcctcctttttacaaggataagtgtgattacagttggggcccaccaggagaatcccatgtccttaatgtaatcacatttgcaaagccccactccccacatatgtaatatgcctaggctccagggtttaagagtgatgcttccatgaaccttattttgtctactgtaggagctgagattcaggataacagccatagtggttggacctatttagagacagacacaatgaacaaagagctaggcttatgtcttaggggtagaaaagaatgaaacaaattatttctaactgcttccaatttcttcaagagggagaactgtcctcctacttaaaatggttggacacattccattgataagtaaagacaaagttgatcgaggagctactatgtgtgcatttggccgtgtgtgtgtgtgtgtgtgtgtgtgtgtgtgtgtgtgtgtgtgtgtgttgcttaatccagatctatatgtcaggctctcagagaagtggcaaatatcatctcaagactctactagaaaaacaacaaaacaacaaaaagccttattcattgtataattcttcgttcttcgggatgtggctctaatatcacttcctgtggaaactgatttccctgaggtttacccccaacacacacacacacacacacacacacacacacacacacgcacgcacgcacgcacgcacgcacgcacgcacgcacgcacacacaaacacacacacacacatacacacacacacatacaaacacacacacatacaaacacacacagacacactcacacacacatacaaacacacacacacacacacacacacacacacacacacacacacacattgctgcaaatccataggctatgtactccttcctttccagtatattcctagcaccacacaatccttggcatataggaattacttcattggtgtttgttaaatgaataatcacatccaatgccctgggtacttcattgtgtggagcacttttctgagagctttatatttgttaatcctcttaggggaattaggaggaaaggaaacagaaagagaagaaaaatgagaaaaagagaagtatgggaagacagacaaacaaatgtctccatttttgtaagaagtataatgagataaagggatgataaaaaaattgtaaccctgatgcttattccatatgaagattgcgaatgaattattaaacagacatagggtgtgaataatgtcagatcacttcaagcttggcacagatctcgaatttaggttcccctacacctgtcatgagtatacgagaggaatgggaaacaaaacaagagtgaaacgctcaaagccccgagctgctgcaggtttaatatgggctggcatcgtgctgcacaggggaaatgtcaccatcgcatgctcccgttgtggaagcagagcacaccagttgtgggaagagtagaaatcacagggactatgatgcagcagagagaatgtgagtcctttgacattggtgacatgagccaatgacttgaaatgtcaaagctttttgtttgttttgttttttgcttcaccacctaaatgcatgcctagccttggagttactatcgtcataaagtaaagaaagggtccggcccatgctgtgatctagagtgtgcatttgcttctccttctccttttgattgtatgctgcaggaggccaacaatgggagagcagcaaactgtaggaactggcagaggaagggcattaccctgatgcattagctagaaactgtgttctgtgacgatgctatctttttgttgttatgcaatatttttagtaactatttgagaatttcagacatgcacatgtccatccccccaagttctccccataacttcttccaaatctactaccccaaccctcaccaatctgattgtagatgaatgtcattgtgctgtctttcgtatgatgctacattgtgatcaagggactcactggaggtgacatcgctcatgaaaatcagaggtaagacacgaatgcgtgctaactgagcgttcagtctggaaaccttttcgtttctagtgaagcctcccttagaagcagtagtagaaggttctgggaagtgccattatggagatgcctaaagaatgacatggcaactctcagaaaactttcattggactatcctgagctaaagggaacagagtgcttccagaatgtagggaccaggagtgctgggtgacagctacaggcagacaaacttgggctcagctagggggcaggggctactctgcagcccttggaggtaagttgtcagatggagattggctagaggactactaagtatccaggaataagatgaggtgtctgtcctggcacatctgtgaaactcgattcattcatttattccaaagttgagcacttaactctcgaaccaaaggccgcacgaggcatcgaggaggatgagtagcttctgaagatgctgtctctgtgatggaaatcacctcggatgccctccacagctttagaaatcatgagtgtttgacatttttatttaaacagatttgaaggcatttggaaaaacacaattggcatcgacagtggagaccttcaccactgacagatcaatgctatgctcacctaaatattgcctcactttgtgagactcattggacatacaaaaagaggacatggctctgatagccttgtgttcatcttcccaaactcgaaagatgacagggggcagggtgatggtgttttctcttttcccatttcctttctgagagaaatcttattccctttattctcacacaatctaggatatgagctgaaattctgagagaggttgggtcagttcagttcccatgcctttgaaattttgaaaaggtagccatgtgctcatccaaggcctctcaatatttgcatttctaagccctataaattataagcatttgttttatgaaacttggaaagattactgtttgtctcaaattacactggttctgccggcatcccaccagaacacagaatggtggagcatatgagatagaaacctgacactcagttctctgcgatgtgttaaacagagagagaaagaaatgtactgctgtacaaaaagctggataatcagtctcgagctgcaaattaaaagattaaatcagtcaaaaggacagaaactatatgaaaggttcctgtaaatctgaacctctgagagagtccaggagcagcaggcagggggaacaacgtaaaaccaaatgctttaaacctaacctgaggctgctgatttgttttcattttatttatttagcagtgggaattaattctcaggcttggtgcagggcagactaatgtgttaccactgagttataaccaagatactgaatttataatctggattcaaagtggggtttgtgcaggtccatagctcatgtcaaattctcctaatgtgttgaagtatgtttggggtgttgggtaattgtttttttattgttaacttaaaaaataaaactataacagtccctatcatgtagaacggtgttttccatgtttgaaagtaaagggaaaaaggaaaatgatgaacttttccaatacattagtttcaaacccagagcttcaccacacaagcaattttcatcccatggtgttttctcaggccggtccatatatttaaatgtcaaaataataatgccactaatagcagtaggccaggagaaccttaatgagccaccaaagagaaattctgcagctcacctcctgagtcctacccaaactaccacttcctacaaagaccttgctttagcctgacttaccagacgtgatatccccagacttccatgtctccccaaagaactcagacgccatgtatcactagctagagcagatctttaactcttgatgaaactgatgcatgcgtagagatagtctttgattaatagcaaactactttaagaagcaaaatttaaaaagcttccttatttcccaaacctaatttcttagcattcaaaacagaagtgagttaccaatgcaagagccattgagggactgaagatttaatgtggaccagtgagacggctcagtgacaaaggtgcttggagtcaagcctgagtttaatcactgagacccacgatgggaagagagaactgactctgtgcattgtcttctgacttccatgggcatgctagggtgatgcacattctctctctctctctctctctctctctctctctctctctctctctctctctccctctctctctcaaacacacacacacataccagagagagagagagagagagagagacagagagacagagaaagagaaagagaaagagaaagagaaagagaaagagaaagagaaagagagagaaagaaaactaatttttaaaaacttaactttcctccagaggcaatgaaaactgtttacctcaatggtttcctagagtatgtactttgggactagaaaaagagactgttcttagttagtagataggaaacccagagacttcgtactgttcacagcattctgtggcagtgattccactctggactatgctcttcaagttgagaatatggaatgcgattcacttttgacgcccagaagtctgtagatgggtggctcccttgagctggaacgatttattcttacaggattgtaatgtcaggacaatttacaaagggtgataatcaggcagtcttagagggatggggtcttggacctttcctgtggacctgctccacttctgttcaaaggaaaacctgtcctgttttataaagagaacttctgcaagatggtctcacagttctctgcgtaggaaaaaaattcatagtcctgatgagattgcctactggaacagttcatgggtaatgtgtgaccaccctctgtgacagcacggttctaagaacagaaccaattagccttcagccctttcttccccaggtcttcctcagctcccgccatcctatacaattgctcctattagaggtatttgctgcattaagaatttgagttcggagactggggagatggctctgtgggtaagagggcttgctgcacgtttgtgaggaattgtgttcaaatcttcagcaccctcttaatgtggcagcaagtacccatgaccccaatgctgtaggaagcagagacagatgggctgctggggattgctgactgccagcctggctccaggttcagtgagagatcctgtctcagggaataaggagagtattaaagcagagtatcctatgtcctctggcctacatgctcacacatgaacacacacacacacacacacacacacacacacacacacacacacacacacacacacacgataatattttttttaaaagaatctgtattcaagattgccatgtatcacatggggatcaaagatactgttttgggtgtcacagctctggtctctcctctagccatgacttttttggacacgtgatcactggctccacagggagccagttgctccctgtggcagaaactcctaacacctccctcagaaatctgttgagaaagctggccatggtggcacacacctgcagtcccagcaccgagcacctaggaaatagagacaggagggttctgaatttaatgccagcctgagctacatgctaaagtcctgtctgaaagaagaataaatagtttataaaagtcagtttgataatatacaaaaaacacttatttcaccgtctgtgcaagtcaagccttgatacatgttaggtaatacccgcagatttagacatttagctgtgatcgatttggggaataaccatagatagtccagagagctggccttttatatgtaccctcaaacccatgtgatatctaaggttctatctgacactggttcatgtgaagcctgattggtttcatttggtgcctgtctcatttcctgtaatatataagccccagcagtaccctggtgccttggcaaggttcacatggacaaagggagaaataaccagagggcttttggcgaagaacttcattaaggcagagccctgcatgacaaggaaaaggtcactgtgctaagagcatgggtgccatgagggagagtcccagaaggtgatactgatgtatgtgaagctgcttgacttgtagttggccctgacatggacaccctgaaacgtgggatcatcagtggaggcaggagtggggctgcccgcacctaggagcatagccacaggcagcctttgtgctgaggaggatttgttcaatgccatttcaggaggcttcatggtatgctcaggtgtgttgggcaggagtcggggaacacactcccctgctatttctctattttccaaagtgctaaggatcagaggacattctaaaaggactttctaggttacttcacataatgggcacaatgttctcagtgtgctgggaaagtacctagtttcccagacggctggagtttctgcatagtcagctgcagtagttggaatggacaggcctcagacatgggtaccgtggtcttattcacagtgcacacatgcactaagagctagcaaacatgcaacattgtctctcctgactttgtccttgcctcggactccccatcatccccccaactcctgcagagaccttgaggtttcactctgttgttctagatccttcttcacaagcagatctgaaatacatgcccaggacaaaaactcgccaacataaaatattgaatgaggtatttattggaacaaaaggagaagggcgtttgcttgttatatttttacagagtataatctgtgtgtatgtaagtgtgtgcatagataaacagaaaggagggattgtcagttgatccgactgtagccgtggaatcagaaagaacattgcttttcaaactgctccctggtgctggggagtcactgagttggtaaagtgctccctgcaggagcttgaggacctgagtttggatcccagcacccaggagataaagctgcatgtggctgtgtgtgctgaaacctcagtgctggggagttggagacaaagcatccctggggctcggtggccagccaggggagctgaatctgtgagtccaggttcagtgagagactctgcctcaaaaaataatgtaggtagtgaatgaagaagatggggggagggttgacctctgacctcagcatgaatgtgcacacatgtatttacatacccacattcacatgtgcacacatacaacaaagtacacacacacacacacacacacacctctcaccacacgcacacgcacacacctcacagattcacacacacacacacacacacacacacacacacacacacacacacacaccacgattcctcagagtaagtctcactcattagagtatgcttcaatcaagcagatacacttacaaggctgatcttcaatacagaggcgttcccataaaaggagcagtattgatgtcaaccctcaaaccaccagttctttcagggaaattacacttgtgatttgatgttcttcctaaggaaacactggcatagggggacaaattactgtgatttcagggcagaacgtaggttgtttgctcaccaccatcaagccctaggcacaagttttctttgaaaggctcagggtcctgtttcccatgctcagggtggatcagagaagggaggatcttggtgctcatcaggcctgacatccagttttatgctggggacctgagacaagagaagggttaagtgacttgtaagtgatgccgggttattaattagctaggttaggaagggacatctctagcgtcatggttcaatgccccctttccccctacaatgttatcttctctcttcccttacaacgttacctcctttcttaacagaaatggaacctgcatcaaaaaatctcctgagagatgtcatgtggaaatatatatatatatatatatatatatatatatatatatatatatatatatatgatgcatttttattccactttgagaaaaatgctgccaagctgctccctggggagtggagcctctatgaagagaggagggctcttctgtgcttggagatcacaatgaataatcattcctttcacacctagactgcatcccaaaggccacagtcaccctgggggagatgatcacatggaggagggcatgtgagctggttaaggaggaaagcccccccccaagagaaaagcagaggagtagagcagttgggggacactggggagagatgaaaaacaaggaaaactagacatcaagagagaagcctgatcagcttagctcgtatcaatattatattatttttgtatgtgtgaaatatctttttttatagccatcgagagacccataaagaatcagatagatgccttttggctaggctgcaggacagtgggggagggggaggggggcttccagcatcttttttcatttgtgtgtgttttaaattcacttagccattgggaaggagagacctgtgtaggagaacaagagtctagatgggttcaggccaaaataaaagcatgcagaaagaaacagagttgaaatgctgacgggacaaacaccgagaatgctgtgcccacctcagcgaggaagggggatctgtttctctatggaagatgcactctgatcttatcaagtttactttattttttgtaaaatatttaaaataacaattgactccctatttagttatttattgagataagcctcattatattgtccaggctaatctccattcccggattgaaaggatcctcctgctttagtctctgcagtaacgggaagtgctggtgtgtgctgcaacccccatgtctctttgttatggaaaagtcttggtttccaccaccaccaccaccacccccacccccaccacccccatatcaccaccacccccatatcaccaccaccctaccacccaaccacccaccaccaaagtctagatattctcggtacaccaaagttcctgataaaattaccttattgttcagatgccagtggatattataacacataatatgtctcttcacctagtaggtgctgaagagctatccactggcttggctggcacgcaactctttgccaaagaacttaacctagcacctatgtaagaccatgtgatcagtttgcacaaacccagggagcacctttctgggttttctcctgctcacaccgtctcggggccccagaaactcaggaaacccactcagatctcacgtctaattgattgcagctgttttttcttccttttttttcaccctccttgtaaagaatcttttcatctctccctgagaacaacacagtttgacacttagatcttcctctcctccaccttagcacaaagcaatgcaatgacagcaaagggtgtgttcttcctctgaactaggcaaccttctttccaagctgagtccaaagatggagggagaagaaataaaagctaggtctcgatgaggtgtgtgtgtcacagcctcgtgtctgaatacacacagctgccggccgtggcccagaggctctccatcacaaccacttccaagctccaccagctccagagagttccacacacgggcctggaggacgatttttgccctcagagagcagtcctcatttctaattaaattttcatttgcaattttctcataaagaacacacacacccacaaaaaatccaaaaccatttctcctcacacagaaagaaatattcaacagaaagaatacacatctctcagctcatcaagtatttgagttcccacaggcctttgcaaacccaacaccacaagcagcctgtgtgaaaagtgtcccctggtgacaaagcaacctgagagttgcagagggaccacaccctcttgtgaggggttttcctgtgaaaactgtaagaagagaagggcatcacattttattcactagaagtaggattctgggcacagatttctttgtcatataaaaccccctgtcaagtgatgccttcttcctgtcttttgtttttaagatacactttggggttgaaaacatgtcatttttgatgtatggactttcaacagtcctcctgctcttatcaagttgtgatagttgctattattattattattattattattattattattattgttattattaattttaagtccagggctctgtgattccacggtattcactcatagtggcttaatcatggactagccttgaaaaacactgctccatttcactgttcgcctgaactgaagtgctcagaattcagtatcaacaagcaccaaatgacctttctaagcacacctaatttactgcatctatttagtttatgataataaataaaacctctgcaatgcttcataatagcagcaacgcctttcaaacgactctgcatttaatggccaatttcagaacattaaatgttgctaacaatcaattgagtggatatcactgtgcttccgtttataaatatcaaattatataggtcacagtgttacctttgccggctagttgcagaatttataccgatgttcttgatcacagtggtttttttttttattagaagtgagaaaactccgactttctgaaggtcccgggctctcctcagatactctctctaactaccccccctcccaggatcaggtaattaaaagggtattgatgcagagggaagcaaagcaccacatggcttggcaaagtgtttccgtaaagttctgtcctgtagctgtggatgcaaactcaagctggtcatgtgcagaattccagcatgtcagcccactacccctcggcacagccaaatgtttcagcagctgcccttttgtcctgtttcttaaataaacaaagaacagatacaaattaatgacctaaatttatggcaaaacacactgccttcccagagcaaacagccttaaaagaacagatgctaaactaacgtttcttacccacagacccccagagatcattccggagagcacccctagtccatagaagtgaaactaatcgtgtgttaaaatgcaacggttttgtgcaatgtcacgttcacaagccaatttcacaagctctccgggtgtggccagtggagtacccatggtttatttggtggtctgatgcccctcttctgctccaagtgtcctaacagctttatttcacttttacattttatttgccaaccccccaccgcccacacatacccacacaggaaagaccaaaaggccattttcttctaggattctaaataatatggttggatttggttgatagcatcctcgctgtgactcctaagattgtctggatggtagaaaatctttgtttttttgtgtcttaatggtggaatgagatatttttcaagaagatgggttatttctatggaactcagttcagaatttgttttctgcattttcctttgctttctgttgtccccactgccagccacacatcacgtccccgccccccccacccagaaatgacgaaacctgaaagcctcactgctaactttgcacccagggatggagctaggtcacctccaagcagacattagagtgaaaaggtacagcgtgttcattggccacacgccgtgcactgtctttatcccacactgtacaacatttccaatcttattcaataatttaatatacattttcttgtcaagcttcttggcagccggctatgcagcttgcaagatggaccgagaatgctacaggtgggctgattagcgggtggcatttctgaattcgagcaagctgttagcattatgtctgtttgctttaggtacagatgtgaaatgatttgacagtagatttcaaaagtgtgtgagtacattttttgtatgtcaaactatggaaatctgtgtttttttaaatttcacacattgatagtatgtattgtatttattaatttcagaaagtatatgccactggcatggcataaaaattaaaaaagcagtatccataatgtataaaatgaacagattggataaacatcccacccccagttaatcagaaagtcttatctcgtgcttcagaaaaagtcagaggttggaatatcatagccagaaatgagaatctttgcaaagtttgttttaattggttttatagtgtgatggcgatttaaaaaaaagaaagaaagaaaaaaagggaaaaaagaagcaaaaggaataacaacgaccacacacaacaaatggcgcgtggaacatttgccagtcacattaagtgacatctgcccttgtctaaaatttcaaaggtgatttcaggatttataagggaaagtctgcttgacatataaaaagaaaagttaaaataaatcttaagaatttaaatttccatgtatgcttaggctacaagatgaatgtgaaagctgagatgccggagctagtgaactgcctgggtggcttctagaggcaattccaggtgactgggagagatggggcttttggctgaggggtcaggaacagcagaggaggagttcaaagggaatattcatgatcaaggctggtgggcacaagttcactttgatgctacgaactgttaggctggcctattgttctcaatgtaactcttccttagtctttggagagtccattgttaatacaactaacctcatctctacccatagaactctgtaaaagcagtagatggcagaaagcctccattcttcccagtgctctggtcctattccagtgtatccaggggagacttgagcccggtagaagctatactaatccagtatatacacgggcttgtgtgtacaggaacacaggaagtggggaggaccccagagaagcacaagctagagctctaacacctgtagggtgaagaaagtggagacctctgggtaaaaatgccactcaacccatcacctgtcattatagctaatgccaggcaacaggagagaggctctcattctgtctccatcattaccacagtgtaaacagcactaggcaaccttgaagaatagctaacatgatgctccaattttacagatgaagacccatggcttggagagggaatgtgtcaaggcattttacaaatagattccgtttgttcatctcagcagatttttgtggcaggctgaaaaagcccacttccccagggatagaacagatgtggggagagccatttgctcatgggcacacaggtggactttcaggctccaggttttgcttaagatatagttttcaagatcagatccattcaccattatttgctgggcattcactttgtgtcggaggccattctgtgtgctaagaataagcagagaataaactagagcagtacctctgcccataggagccttctttctggtgggagagactaacactaggcgcagtgtctagggtagtgacaagatgagaagaggctacagtggaaaggaagtgaccaaaggtgatatcagaggtgaggtaggctgtgcctggttaaaatccctttgaaggcaaagaggcagccaccttgatcggggactcagaccaaaggcgtggggctaagtataaacccctgaggtggaaacagcctgctgagaccatgaaacagtgagctggctggctgcaacaacatgagctgggagacagcagacaagaggatactgagaaggaaggcagggttgggaggccacgctagagaggaaggcatcattctcagagttaccacagaagcccccacattgtgaatatttctcacagtcatgaggcaaagcatccaaattctacacagcaggtttcccaaccagttcatcgagaactggggttaattatgcaccaggccagaacttgctgactcatattgggttctagtcctctgcacacaacattggaatattgctttcaatacctgctctggttttcctgggctccacctcttatgtgtgtgtccaacatttccatccatttggatagtcagtaatttgaaaaagaaagtgatcattgcagcccctagaccttcattaaaactgttttcctgtttattcttatagcaggtctctagttagtatatacatgtgagtttatatattctttaattgttttaattctttcattatatattctttaattatatactactcaatatataacaagtagtattaatatataataatcaaaataagtagtaataaggataagggcatataaaatggaatccatatggaaatctttgaggatgcagcccacatgagggtctgtattgtctccccttgcccttcatacctggcatactgtaggcacctaagcaaaatctgatgaatgtcaaagggcattttcaccagaagaagagaaagcagacagctaagaaaatttctttcacgttttacctttttgatgtgattggaatgtgggttattttctcctccatcaaaacctaaaatagctcatgctagagggaagcggctccatcctggatgtggagctggaatgttctcctggaacggcatcttgggagtggggagtgccacacacagactctgggtgcagggtttgatggcacccatggttcagagtccacaaacacttgttgccctcttgcgtttgtccagctgctgcggccgtgtcagcctccccactggagcgcagctgctccgtgctgctcttatgtgtctagcatccctcatctgcaccatcaggtcttagaagctgcgaggatcccctgaacttgacgcttatcctctgcttatcctctatagcaacaacgtcccataaacaccacctgtgcccggacatcatatacccttctaaaactccaagccgtgaaacaaataccactttgtgtttattttcaggacaagaaaaagggtcttctttaaaaaccatcacaaaaacttaaaaaataacgaacttcgttgcagtgtgtgcatctctgctaggaagtggatgctgctggcttgtcatgatgagggccagcgcctgagcgatgcccgcggagagatgatggatttgagctgatccatctccactcccaggttgccgggtcccccctgtgaccaatggcaagcatttatgagacagctggcagggtgaggggtgcaggccaggctgtgctcccagctcatcggcctctgcacagagcaaaggctcattagcatttcctctcaccaaatcaactcattggctctgataatctgtactgcttaaaactttgcaacagctgtaaaatttgtcaactgggcagggttaggatttggtttttgacacttcagtacccaatccttataacatatgatatatatatatatatataatatatatatatatatatatatatagtgatttaagggttttttttgtttgtttgcaaggacaacttgaaaacaaattatttcccaaagtaacaaaatactgtttggttgtacgtttgatctggcagcaagctactcaagaattgacttcagaatctgtggagagatgggtaaggttgggtaactgcaggcaatgcgactcgtgctgcctaggctacgcagtgttactgcccatggggctcatcaggcaacatcaaagtaaagaatgtggaaagaattgccttccaatcccaattcactttttccccagcatttgtgtatttgtgtatttattgattgatttatgttggatactgagtcttattatgttgcccaagctgtgtaacagtttttttctttgggctgccagctcacaaaaaatgacatgacttattgctaatcataaaagctcggccttattttaggcttgttcctaactagttattataacttcaattaacccatatttcttaatctgcatttttttgttttttttttttgttttttaacatggctcagttatctttactctgcattgcctgtatcccttcctctgtgtctggctaataacacctttcttcttcccagagttctctgtccagaaggcccccctatacctcctacctagctcttgaccactagctttgtgtgtgtgtgtgtgtgtgtgtgtgtgtgtgtgtgtgtgtgtgttgttgttttcgagacagggtttctctgtgtagctttggagcctatcctggcactctctctggagaccaggctggcctcgaactcacagagatctgcctgcctctgtctcccgagtgctgggattaaaggcatgtgccaccaacgcccggctaaccactagctttttattaaaccaatcacaatgacattatctttacacagtgtacaaaaagattattccaaaaacatttccctctcttggtctaaataaaaatgaaagatttttaactctaacataataaaactataaacaataagaaccattatcaggtaagaattacattcataatgtccagtccatttgcatttggcaaattcagaggaaaaactcctgcattcaggggaccctccagccttagctcacaggctgttgggatagggaggcctgtgtcagcaatctacttagaattcagccccacccgctcactgcctacgtatcagcaagttcatttctgtacccccccacacaaagttaccagagagaaaaccaattaccacatccagatatatgtcctttgtataaactccagaacgatttttttccaaatgccaatggtctagttaaaagcccacgagactctctgtccctagtagggacatcggcacaaaagcgggagctttctgctttgcctctgttcaatggagacactcaggttctctgtgtgggctgtccagtcttttgaaacaggaagcacatggaactctgtgctattcattctcctttaagagccttctggttccctttttggagtgacctggaagggaaggaagacagcagcttgctttctgtgtgtgtttccagacatgtgctttgtgcatcccactttccagcaaggccccggcatcatgctgagcatggagctggcactatggaaaggactgagagggctgtgccatcctcaacctcagtgtcccacctctgtctgtccagttccctgagatgcctaccctgagacagctgatgcttagacttgtggtgtcaaataatgtaatgagaacaactgtttagatagccccaaaatgaaatcatgaaaactgtataaacatctctttttaaggcttaaaataaaattaagaaaaaaaaaaaccctcatggtgtgtggagtgcaagcaagaaacagctgttgagaggatgggataatggataacgagtctggcgagcagctcggtggagatggttctatggtcctaggcaggggtgaggatgcttctggcagggagaagggaggacgccagtataatcaatcaagtcaggaatgccaaccattgcgttttacagtgaggacttgcttctcagtgggttgcattttctcactcataattctcttcagtgggacagagagagagagagagagagagagagagagagagagagagagagagaggagagggagggagggagggagggagggaaagatgaaagagagcctattttataggcaacttttaaggaagagccatgttgctattctttgctaagtatgcagtcaggcacacaaagtctcagtcatactgccttgagatgcgtgggcctacagttcatgtaacttaaaaatggctttgaacctgtggtcccagctactgagaaagcagaggtcggaggatcgcttgagcccaggattcagaagccagcctgggcagcagatcaaggctccatctcttctgggaaaaataaaagggctggataatcggtgtgctggccaaccagactggagaggatggaccattgctcagcactgttccccacccagagaagatggaggagatgcatacaccagacatttcagtgtcttctgagcctgatgtctccatcgtgacatctctttcctgttctataatgaccccttgcatagtcttttttatatgaattactgtttaatgtctgttcacatttttaacagtttgaagtctttagctggcgtatctatctagaggacagccatccttatttatacaaggctaaattgttctcagattaatacaccagtgcatgacttaaatgatgttaacaaaatgtgtcaaggatcttagttagcagcgtgccttcacatccagattgaacatattgttagcactgggtaggttttttttttttttaatcctatgcattttactaaaaatagtttaccaaaagaaaatctgctttaatttaattgtgcttaaaaaaatccatcatctgccaggaattagttacattaacattagaatttgaaactatatagtcagcaaaaggaaactccccataaaagaaatttcaccggtactaaagatgtatctggatggaagcaagcaacaaggccagcaccaaaaccagggtagggatgcacaaatgtgttcgtgcatttacctgtctatcaaccttcatttgtatgggaaacagagatctaggggcaacctggagctctgttaggtggggttgaaggctttgctgggcacatgggaaggccatatcctcttgatgctaacacagagagaagagccatagctatgccagggcaaccacagcagggacagcagcctccccacaggcacatgatgctcaacttggtgtcgatggtaataaccggactaggccatagaaagccctaagacttcctttatcattagcactctgcctcccagaggtggcagccttcccttggccagaaattgcagggacctcacggttttcctccatcttacaagcttgttctaacctatcagcaagtttgatgtgtgctgtttccttccctgaggccatgctgaatcagcagattagcaagcatagatgaaacaccaataacagtttatgctggaaaaagaggaacactcctccactgctggtgggagtgccaactcgtacagccactttggaaatctgtatggcgatttctcgggaaaatgggaatgagtctaccacaagatccagcaattccactcttaggcatatacccaaaagaagtacactcctacaacaaggacatctcttcaatgatgttcatcacagcattatttgtaatagccagaacctggaaacaacctagattcccctcaaccaaagaatggatggagaaaatgtggtacatttacacaatggagtactacacagtggggggtggggtgggcaatggaatcttgaaatttgcaggcaaatggatggaactagaagaaaccattctgagagaggtaatccagtcacaaaaagacaaacatggtatgtactcactcatatgtgcattttagacatagagcaaaggattaccagcttataatccacactgccagagaagctaggaaactaggaggacttaagagagacatacatggtcccctggagaaggggaaaggaacaagatctcctgagctaattgggagcacggggtgttggggaaggtggtggagggacagggaacctggagaatgagaaggggagatggaggagtgaggaggacatgacggggcagggaggttgagttgggggaagaacagaagagagcaagataagagatcatataatagagggagacatttttggtttaaagagaaatcaggcactagggaaatgtctggagatctacaaagatgacaccaactaacaatctaagcaacagaggagaggctaccttaaatgccctctcctgataaagagattgatgactaattcatatgccatcatatagccttcatccagcagctggtggaagtagaagcagacacccacagctaaacactgaactgaactggaatccagttgcagagaaggacgagtgaagagcaaaggggtccagaccaggctggtgaaacccacagaaacagctgacctgaacaagggaaaactcttggtccccagactgatagctgggaaaccagcatgggactgatccagaccccaggaacatgggtgtcagtgaggagaccttggaaatctatgggacctcttatagtggatcagtacttatccctagcacaggaatggactttgggagcccatcccacatggagggaaactccctgagcctagacacaagggggttggcctaggccctgtcccaaagaataagacagactttgaagaccccccccccatggaaggcctcatcctgccttgggagcagaaagggtatgggataggtagggtgttagttatggggggggggaaggggagtaagggagggaaagggatctgggattgacatgtaaaataattttctttctagttaaaattaaaaattaagaaacattgttgagccttaaattatgttctaaaactatagttaaacaataaaacaataaagaaaaagcattgaagagagggctatctgcagcagcttcagacaaatcggtttcctgagattctggagttctgacaaggacaccagtgtgcttcagaaagaccacagaaccccaggtctctgtgcagacatggtgatcagtactggtgatgggaactgatgcttaggtgcactcagtgtgaaccatgggcagcaagggtctcagaaaaaagaggtgcttctagatttgtttggtctttcaaatacgaagtttaccacctcagagtctgctcacccaatgcaaggagagcatcccccagagcccctcaggtacatcttcccaagaactgaccttacccaatgttgatgtgctgacagaagtcacagcccaagatgggatggtggcaggcagcttgactaatcttggttatcacaacagatggaaaactagacaaaactttccatagaatgagtctaccacaaaactgcttgatgcaacagaaggatgctaagaattgccccttacttaatgcaataaaattgctggatttctactcaccccttttgatatttttcacagattcatcttcggtggtgcacattttcaattcagacccctctatcacatgcaaaactcactgcatactactagaatgtgtgacaattcctggtgcatgggttggcaggctcctcctcaaacacatgctcctgctgtctccctgacaaatgacctctcctgggtactgctcagcagccatcttccaatgggtacacatacttggacttgcactgccgagaaagcatgttttacacccaccgccagaatgctttttgatcatttcaattgttttgtttcatctctgctttttgtttaatttcgtttacagtgcaaatagcctcagcagaagccgaccattaattctgggaaacagagccagcatttcattctagtctttccctcccccatgaaccatctcttcatggactaggaggggccttactcatgctccttccactattgctgcaaggagaaagagccccgtgtcccctcacgtctgcttcagaacaggggcccatgaggaactcagcacactggctgtgagacagagggaggtggtcagagccaaggctgcaagaagcaagaaaatgctcctttttttcagatccaaagagccttccagtgctgggtaagggtgccagtcagtgctggagccttcaaacgctgctggggtctccccctccccttccctataccaagggagccccctccagcaactttgcttaattaacctgttctgagaggctggaaaatcccctcagctgaatagcccacaaattgagtctgaacagctagcagattcccgtcatgtatgctgttcagagtattaattatactaccaagccctctgtgtgcccaccctgccattaaaagaccagaattaagaggagcacccatttgctaaggaaacccatgcacaggaactgtgtccacaggaggcttggagtgggggtaaccaatgcacacctgtacactcaagtttcaaaggacaaaagtcaggatggaaagatggttcagcaggcaagagaatgagcctgaggacctgagttcaaatccccaacactagtgaaaacaaacaaactgggtagggttgcacatgcctgtagttccagtactgtggctggggcacagagatgttgctgagtgaccacctggctccagggtcagtgatgaacctttctcaagggaaccaggtagagagtaatagattgggacagacaattacctctacacagatgtacatatgcaaacaaacacacatacacatggtgtatgtttctcagtggatgcagacactgcagaagacaccaaatctcaggtatggtgttcatgattgtatctacaattatagaaaaagcaactcgcaagttaggcccagaaatattaactcatcatagatacagcaattggaacaagtgccataatcaaaagttatgtctatgtgaatgtactctttctttctcagcccccaaataccttaacaagacataatcatccttcttcttgtgataggagatgatacaataactttgtgaaaagatgggagctaaatgacataggtaccatgccatggcagtaagttgctatgacagcattacctgaggacaaggtgactatgacagttgacttgataacaaagatggcttcccagtgactagcaggtgggtggtgtgtacagtgtggacagtctgaaccaaagggagacattcatgtctagagagtttatcatgctactcaaaatggcatgccatttaaggcttatgaattttgatttctggaacttcccatttaatttttttttgtttttgttttttgaactgtggctggctgtgggtaactgaaaccacagaaagtgaaactgtggataaaaagtggctactgactttcactccaaatggtcctacaggatggctgaaaggtcaatgccagagcacagtagtctgggggtttgaggaagttcccatccgtgccttcattggtcacccacctgtctctctgagatctgtccctcattagtaaaattccaaggaggagtttctggggctgttacaaggacttgtaacataacaaggacttgtgacataacaacacaagtgaaagcattgggctagccaaacacaaggggcagaggcattccttccatctccggctactccttctgtgactcatgccaaacagttgtctgctaacctgcttccatcagtagagagactattgactccatgggtaagtcaggcagtgcagatttcatatgaaatggagatctatgaactggtttaagtcaaataattaaattaaattaaatgggaattttggggtcagagatggagttcagaaccttgttttgtcccttgccgtgcaacactgggtacgttattgagcctcacaaccgccattgctgtcttactttgccttccattgctgtgataaaacaacaaaagcagcttgggaaggaaagagttttatttggtttacacttccacattacagtccatcactgagggaagtcaaagcaggaacctggagtcaggaatggaatcagagaccatggagaaactctacttactggttttcccctcatggcttgttcaccctcctttgttacataacacaggactctctgccagggtaggggtggcactactcacaatggttgagccttcccacatcaatcatttatcaagaaaatactctaccagctgagccatggtggtgcacacctttaatcccagcactcaggaggcagaggcaggcagatctctgagttcgaggccagcctagtctgcagagggagttccaggacaggctccgaagctacacaaagaaactctgtcttgaaaaacaagaaaaaagaaaactccctaccaacttgcctactagccaatgtgatagaggcattgtttcaagtgaggtttcttcttcccagatgacctgagtttgtgtcaagttgacaagattagccagcacaatttcctttactatctggagtacatgggtgagggcaatgacatttcctatagtcagattaaatgagagaattcatgtgaagcctccgtcctagcacccagcaagtggtcaggccaatacatatgacacaaatctgtatgctggagcccttggcacacacccggattctaccaggtattgtgtgaatggtgtgttcccattcattgaaactatttttccaaacttcactcaagtgttacaacttccataaagccgtccttgattcagtttcaactcatccacgtaagttaatgtattgttggccatgtgctcaaagataacaaatagataatatgtatgaattaatttgcatatacatgtaaacattacaacaagtatgtgtcctggtatcatttctgttgttgtgataaaacaacctgacaacaagtgctttagtggaaaagggtttcttttagctcacaatttcaggctgtagtccaccactgtgttgacattgtaacagcaagagcttgagttagctggtcacatcacatccaaaatcaagagcagagttatatgaatgcatatgtactcagttgctttcttgtttgtgcccaacttgatttctccactcttatatagttcagggtccctcatctagggaattgtaccacccacagtgggctgggtattcctgcatcaatcatgatgacaatcccctgccctgagactctaggttgtgtaaaattgacaatgaaagctaataaacatcacaaaatgtagtgatcagttggcaaaactgtgaagaagaagcttgaagaaacataacctgacatttcttgcttggaataattactcagtcccattgagttcaatgttcagcaagttaccaaacataaccatcccttgtcacaagaattacctgtaactcttcttgaatgaggctaataaaacatggcttattaattttcttatttttccatcgtcactaacccctggatgactgctatattcatactgggtgtcacggaatgttcactgacatgtgtgatctgacaaagctggactagctccttctgggtatgggatgcttattttccatttaatcgaagtctacttgggatagtgtaattatacaaagtggctctatgccacaaacactgccagctgctccatctttccttccataagatgaaaaagtacagtagcaaatgaccttagcctagtggtcccaaaatttttgcagtcctctggcaaactcttgaagatctagattgaatgtgtgttaagggaaacgatatcataaagttccaaaaggttggttagacaactaaaaggtctgcattttacaggaaattctggatggggacagctgtgattccgagtctgtctgaaatgaggcattcatcaaatgttatctgggatgaaggtcctggtgagcattggtacccaccactcaggagagggctggcaaacttctggaataagtcattattttgtgcctaatgcagttgggtttgctggatcccagactaagagcaccctagagtgtacacggtatcgaaaggaatgaagtgtttttgttcgttactaacaggctgatcgtaaagcccatactactgtctcacaggtgagtgatagctgcgtgtagttttcccaatataaatataaatatcatccgatctctattggctgagtccaaaatcttctacttagactcaccatggcccccatttaggaggaaaataattgacttagccactttattcaaggtacttgaagaacagcacatacttggcatatactggggctgagaaaatgactcaacaggtatagcatttgcccagcaagcataagaacctgagttcaaatcccagaaagcacataaagctattatggtagcatacaactgtagttctagtgcatacctatgatgaaatggatggggagagtggggacaggaggggattggagctgggacagacacgggaaagcttcttggtcaactagcctggcacacgtggggaaagggggctaggggggtaaagtggggtgcaaataatgcgtacctcaaaggagtcagaccaagtttgacgaacagatgttttaataggaaagtactcacgcaaccagtctgtcctctaaaccaggcaaaccatggaacagaaagagatccgcctgtatgcaaccctcatatttaaggtcttgccacgtcactgaccacgccctagtgtgtgtggtctgcatcacctgtgccagcccccaagagggtgtggctaacatttcccctacagggggggatgattaacaagagaccttgaacaggacaggaagagggaatcaacacccatggttgcctctgacttccacactttactgcagtacacacacacttacatttacacgcatgaatgccttgtgcaacacatatctgcacactttaaaatcataggtatagctaaaggggtcaaaaggagagacggctggctcctggacacgatggctcttcccctcctgtttccctttgtcttccccacccacccttgacctttcttccataatcagacaagattcttcaaggtggccttcttcaaaagtagccaacccaagctgctaaataaacaaataaggctgaggcagacctgtccctaagatggcaaagcttagatttattccacaacctgatgataaagaagacacgaaagcagaataagtagtgaggatactactggtataccccgacaaccattgtaatgtctacaacatatttctttgagaaaaatattaaaggaacaccttgacccttggtcacatttctttgggtttgcctagcaaaaatcatatatgaatggaaagacttatgtgacaaagaggctccaggagatgggagcagaagtcttcagggaccagaagggaggaaagaggcagtgtgcagagctgtagagagcactcatgggtgaggatgcaggatgggaaggtgaatgtggaaggggcagagaggacagagcccagattgcccagtgaagcccaatagaagcctgtggaactgagggttaaggagtgtgtcagctgagggacaatggagatccactgggcgactttcagcaggagatcacagtgcttagaaccgaaccccagtgaggagaataaaagcatcagagagaaatccaggggcgcagaggctcaaccacgagaaggcttaacctcagcaggcgatagggaggaaaggtggatgccttcattcatggtcacgaaggctgggtctgtgatcctgggaactgagccggtggggcagggtgctcagggagaggagacttaaagactgggtttggggcacagtggctgggaggtggaggtgtgtggtgagcgaggtggaaggaagggcttggcgtgtggtgtttaagatgctggaagcaattgaaaattggcagagtctccatatgacttcatctgaattgcatttcagatattaactcaccaactgttccgactgtttctttgttacctactagtgtttcccaaaaagagtgtgcacagtcctgatttctcagaccaggcctggccaagtggagttgagtctatcactgacaaagtgcttgttagaaaaagtgtttctcaacaaaggctgcatgaggattgcatccttagactctgggctgctgatgctggctgaaaaatcttgatctggtcttcttttttttttttttaaccccatccttccttcagtctcactccacatacacacgtgttctctctctctctctctctctctctctctctctctctctctctctctctctcttcctccctccctcctattatactaagcccagacactatcaactgtgaaagacagatacacaggtgaataattactggctgtatttatgattcctgagcagccagtgtgcctaaaagagtgagttaggcagcactgaaatatgcacctttgtggtggtggttcgtttgtttgtttggttgtttggtttggtttggtttggtttggttttgagacagggtttctctgtggaacagtcctggctgtcctgaaactcattctgtagaccaggctggcctcaaactcacagagacgctcctgtctctgcctcctgagtgctgggattacaggagtgtgctaccaccacccagcaaatatgcactcttaactgctgggccatctctccagctccagatttgcctttcttgtctttgtaaccaaactcctgacataaacaatcgaagggaggagaaacctatttgggttcatggttttaaatgctatggtccacggttgcttggtcctattctattaggtagaacattggggtaacagaaatgtgtgtggtagaggagattcttcacctggaagcagagagagagggaaacacaaaggggccaggaacaagatacccctcactccaagtagtcagaccaatgagctaagtcctgctacctaaccttcccaaaatatccccaaatagcactaagaataacaagccaggtcgcactgcttactaacagagaattttggttaaattattaaaattcctgatgccacaatattcttatctgtaaaatggtagcaaaagccatgctccgtagggcttacaaaaattcagtgataactctggcctaacctaaatggagctaggcacctaattgtgttcccagtatatgttaagtggtcagtacaccttagcttttattaactggcagtgcatttcaacgtgctatgtcatttaatccttgttgcagttggggggggggaggagaaaacaatattactttctccactcataaatgagaacttcaagaccccgagaaaagagccaatctggcccaagtggttgacagtgccatgtgttttgtttcagggcagagtaaattcaggaaggatgctgtgactctcagtctgacctctaacctcaaacctggaggcagtttaaaactggccaatcagtaaataatcagcagtgatgagagctgctgctagcatcccctagtttaagcttaccccacagacagccagttagcattatttgattgtggtgataaattagattggccaggtattttcttcttcgattttgggaactgtcttcggagaccaggcttattgaaaaaaattaacttctaatttcccacaattgaaacgagtttgctataattattaagtgaattgatggtgttttagacaatgtcagccggtagtcagaagggtccatgaaaacgctaacaagaagtgtgtacacacagagactcatgagggcagttagaagggtgcaaatggcagctttaggctgcacagaaatggatggtttctaggtctacttactcccccccccccccgcgcctacacacccacccaccaccaaatccctgtggagatatcaaagatatctactccaggctggctctccttaagcactttctttctttctttctttctttctttcgttctttctttctttctttcgttctttttcttttttttcttttctttctttttcttttttttttttttttttggttttttgagacaggctttctctgtgtagctttggagcctaacctggcacttgctctgtagaccgggctggcctcgaactcacagagatccacctgcctctgcctcccaagtgctgggattaaaggcatgtgccaccaatgataagctaaaatccctttgttttgtctgtttgttttgagacagggtttctctgtgtagctttgttgaccaggctggccttgaactcacaaatatccacctgcttctgcctcctgagtgctgggactaaaggcgtgcgccaccaacgcccaaccgcttaagcactttcttattcctccttgaagagaatttgccctttctttttctatctatctttttttagacaggtctcactactacatagttcaggttggcctggaacttgttacatagcccaggctagccttgaactcagagagattctcctgcttctttctcctgagtgctgaaattaaaagtgtgcaacaccatgcccaactctgaagtctttttaaaacaagattttatttttatttgatgtgtatgagtgttttgcctgcagtacctgcagaggctggaacagggtcttggaccccgctggacttgaagttacagatggttgtgaattcccatctaggtgctaggaaccaaacccagtcctctggaagcatagcaagtgctcttaaccactgagccaccgtgccagcccccaaagcgtctcttaaatctctagcttctttgccttctagttgacctgtcacaatgaatttggggccagattacctctcaggataaatcagatcattaacctgtctcaacatgaaagccactggtcactatagaaagagttgcatcagtcaccaagacacagaaacaaaagtaagactgcaaatgaaaagtgaaaatgcaaacgaggtaaaaggatgctaaggctgaaaagattgctcagtggttaagagcacttattgctcttgcagagaaatgcctgtgtgtctgattccaggagatttaacaccctccaaaggtactgcccacatgtgcccacataaactcatatatacacatgcgtgcatgtacacagatgcagctgggggctgggaacatgtctcagtggctaaaatgcctgttgcatagcacaaggacctgcatttaaattctcagtgcccacgttaaaaagccaggtgtgccttcagatgtctgtgacaccaggcctggtcgggcagagacacagattcctggagttattggccagcaggcctagctgcatctgtggactccaggttccatgagaaaccccacttcaaaagaaagttaaagagcaatgagaaagacacccctggtccaggaaggagaccgctgagcatgagatggtacactcctcacgaagaaagcaggggcatcccaggcctgttcctataggtgctcactgataggagcagagcactctatgtgtgtcctctctccaataaatgaagcctttttttatagcttggcattttgtgctccccatagggtctgacatatggcagacacagtaaatatctgtaaaatgggtgatggggcatgttagaatgttggaaatgtattgctctaacctcactccatagtaaccaccttgtcaggagtgacacacttagtacatggccaaaattgtgctaagcataatgcatagatatatatgcaggaatatgtctactaattgatcctcgcaaacattttcataagggagattctcaatgtccatttttgtaagagagtaaattaagatgtagggaaattttctatcctaaagaccgagtcactactgagtaccagaaatcacagtctatctgttccccagtcaatgagttggaccactcgattaattatcctgttcgagaagcatgattttgtttgaacctgaactgaactccaaaagttgtgtcaagagacttccctgtaccctctggggatcttcaatcaaactgaggtcattgtctttttggcaaggggcagggagggactgtggcagggtctcatgtagcccaggctagccttgaacttatgtagctgaggatggccttgacttcacctcctaagtgctaagattacaggtgtgtgtcaccacacccagcctaattgcccttgctgcgcactctttgggcacgtctccaccagcacactcaatacattgtcaaataattaattatctggttagctgggcatcctgacagcagggactcttgttcacttatgttctcccattgtgaatagcaaatgtctgaatactgtaagtgctaaataaatgtttgtggagttgattaattatcaaactctgaataaacaatggttatttagaagacacgttggctggagacaattttgactttgatccaaggattccttcatgcaagatcagaatggtccaggtgataagatagtacaatggtttctccacgtctcagcagttcacgtggggctggatttatcgccctctggagtgcaatgctggccttcaactttgctgctccgtcaaccagtggtgaatttaagtgcgggggctgttgactgccacacaagctgaccttgggagcctgaagctctggctggtactggaatgggggatttgttatgaggtgttaacaggacctctgggtcctcaaggagagtgagaagaagaggctagccggaatcagggaacatgatgctccactttaaaagttttaatgttaaaataaaggatgactttttaaaactaacaacataaaagctttaatgaaacacaaatgacaacattttagagcagtgggtaacaggccaggcttgagagctcaacaaattcatttcagttctgaccttgaccctctattaccctatctgtcacacagggagagttaccccccatcttcttgtctgcaaaatggtcttgataatatctactgtaaataatctattccattttcattgctataacaaatatctgcaatgaatccattttgcaagagaaaaggtttattttggctcacaatttgcggggctcagtctgcagtagttgactcccttgctttggggcttgtcaataacatcaactcatggctaggacactaaagacagaaaggaagcaaccattgttccataatctcctccaaggcacacccttgaagacctgtcactgcccattaggccccattcctagagggtccaccacctcccaggaatagcatactggggacccagcttttaacacgtgggatattcagttccaaactgcaacatacagcaacacagatactgcatgcgaaattcttcaggttaggccgactgtgtaacaaaggctcagtcaaagatacttgcattcaagcaatgaaaggtacagttgggtctggagagatggctcagcagttaagagcaggcccaagtttgattcccagaactcatactggcagcatgcaacatcctataactccaactctagggaatccagtgcttcttctggcctctgaaagcacctggactcatgtgctagatccccgcccccacacaaacatatacaaaactaaaaataataaaataaaccctctttaaaatacaggggctggagaaatggctccccagtcgaaagagggtactattcttgcagaggatctggtttcagctcccagaacccacactggatgtctatctcacaacctcctgggcctccagctgcagggggtccaatgcctctggatcatgggctatgttgcccacttctccatagaaaggtaaacaagcacatacaggttctatactcccactgaacctagaaagtgagccacaagctcttctcccagcatccacatcctgaattccctaccaatgcctccaccaccaacactgccccccatgaccatgaactcagccatcaccctaactctgatcaacacaatgtatatagacttgaagcatactgcatgttgtcctgtctggctactcacaaagccgccaaggcaacatgagaaaggaaagttagccccatggcctgattgccactgtctcactggccaataaccatcaacttcaaaaaaaaaaaaaaaaagaaccaaacaagattattttaattaagatcactgcagggcatggtggcacacacctttaatcctagcactcctgtctgtgagattgaggccagcctgctctatatagtgagttccaggtcatctagggctacacagagagaccctgtctcaaaagaaggaaaaaaaattactgctagttaatctaccagacacatcagagatcctatagaaactggttaactaggcctagatctgaaaatatatcaaaccaactcatagaattgtaagctcaaaaaaatgtagttgttctaaacaactaagtattggggcggtttcttatgcagccaaagctaactgatacaagctttcagcctacactggcgatgataagctttttctgtgaaggaccagatggtaacaattttagctttgtaagccataagacctttgttgaaactattaactctgctgctgtcaccaacaaggagccacagacaacatagagaaggacagtcatggctgaattcagccagaaagctgttgtttgttgacccctgttctaacacaacaaatgggtaataaccacacaagaatgtgtaccagcaaaccgcccatgtatctgagcagcccagtcttgtgttctattagaaagaatcattggagagcccaccacagtctggcgtcttggatgagatgaaatatttaagcccaccatcccccactccaaacggaccccaagatacagagaatggtgcaagcagacccttggcaagtaatgttgatttgggagtatggtaaaagagtgaagatgtcagttagtcagttagtgagcaaggtagcacgggcaagtgaggtctggttcactggaacccccaggagatggctacggccataggagggccaaggaagctgggtcatatgtcccccaactccattgtcataacagagctgcttctggcagcatcaaatctacagcattctggcctgaccctacctactgcagccagagaaagttctggaacagagggtagtagcttacaataagaagctggcctgagaatgaggaggctgagagggagggatgccagcatcctctgatacagaaggcttccctgtggagaaggtctggatggaaataagatgggatttacaagcgagagaagctaccactggagggcaggtggaggaggtcacccagagaaaaaggtgtgtgcagaaacattagcagtttgattgacatgtccccacaggctcaagtgctgaagccttggctccatttagtgtcaccattttgtgaggtactgggaaataggggaggtggggtctggttggaggatataggtcactgggggcatgtcctttgggccttacttggctactttctctccccatccctctctctggctctatgatgcagtccctcaccactgtccagaaactgaaccctctgatgctgcaagtcaaagtgaacccttcacaaaccaacataatctatgaaaatccacatccagagtcagctggtcctgggaggagaatatatccgaggctgcttcaacaaattgtcacaaacatgggggcttacatggcagaaatttattctcccacagtgacagaggcaaggagtccgaagtccagatgtgaccatgagtgtgctttccctaaacactctggataggaccccactttgcctctgcctggtttctggtggctcctggccaccactatcattccttgtcttgtagatgtccccccaaatgtccctcttcttattgatattggattaagatgttccttaacctggtctgaccccattttaattggcttatatctgcaaagcttccatttccaaacaagtttgtattttcaggtagcaggagttaggactcaaatctgtcattctaggaatgcagcccaaaccacaagagagaatgaggatgcacagtcaacaggaagatggaaaagcaagtgactgtgttgtctcatgtaccccaaggactcgcccattgacacatttaagtttaactgtcataaataagaggaagacagaaatacacctgtgggacttagaggcatggacaacatgattcttctaagagatgaaagagagagagagagagagagaggaagaggaaagaaagaaaacaaggcagaaagaaaacaaagaaagaaagaccagggataacagggatagagaggagatggacaaggacagacatgaggtcctggagacagtgcagattcagcctcatcaagatgctgaaccgtaaagggaagaagtagacagaggcatagcttgaggcagccaaggaagattttgcttgttttgttttgttttgtttgctttaagatgagactgagcacatcaggagaaaggacagtttcgaggggtgctggatatggagatgatgagcctagagccaagtgctgctgtgacatgatgttggatggattaccaggttctggcttctctggagggtgaaggagggaggagcctgtgagcacaagttctggaatcctctccttagtgttttatgccccagcttgctacaggaatggtcccacatgccgtcattacaacaaccctctttacaacactcaccccctcccccaggctgctattactgtacattttcctagaattgcccttttgtggcccttttatcaataaatgctttctctgtctatctcttaagcactgtctcctaagcactaagaggaggaagcatcaggctgcaaggctggtagtataggctttactccgctggtcttgactgaaacccattaaggaagctggacaggataagtatccttcctacacatagcaaagcaacctagaccccagaggggaaagtgctctagatgccgcggggatccacagccatagcttcagaaacctgactgatgccaaagctgttcccctcatcatgtgatagtcatggcacttctaaggctacataaaaataggaattttctgttcttcaaagggaacccagaggtaaatgggtcactcttttcaagatttattgagtaacaagtaatacacaaggcctcgctgtcctagaaggaataaaggatggtagttcctggtttaggactaactttgccaccctcaagaaggccgtacaactgaagaacatggagaaaatgcaacaagaaccatttctccatcatatgtgagcattctctgtccaggaaaacatttttctaagctccactatatgccaggaattattctcaagactgcaggtgaaaataaatcagacgtttttcctgtgtccaaagatctcactgctacagtttgtgtctagaccctttcctggcattaagggattgttccctaactaggcactactgagtggtgagaattttaggagggggctctggttggaggacgggattgaaggacctctctcctgctgcagtgatgggaacaggcttgcgttatagcacacaaaagcaatgagcccagctgataatggacagaagcctccaaatccaagagctcaaagaaaccattccccccttttaagctattactggtgttttgttgtaacagtcgaaagctgacctatgtacccaggatctgaataggcagataccacatggtacagattggtcgcactggtcactggggccaaggagtttaaagagtaatgatatgtcaggtaagctggtgggacacagagtctctaagaagaatgtggggtgcgggggaatcctaggatgggaagaggaggaatgagtcaaaatggtgacagtagtaacgataacatacaacctttatgtcgtgtttatggcttacaacacacttttgcatttagtctttataacagccctttgagaagcagacagaaaagtgccttccccaagacgattaggtctgtgaaatgactgctccctgagcagcattatagtcaaaaagaataacatgagctctccaccattattacatgacgtggtcatcagacatagcttcctgcatcccgtttgacagcttttgtctagtttgggcatatgctaatggatgatagttagcccaagcagggcttccctggccactttgtcgtagagtttcccaccaccccagctgatctccacttcctcagccagatgtgcatccttcctgcctttttgttgactgccaccagtgaaggactaagaatgaacagcccccactggaaaagtcatttaggtggaatcacaagtcgtctcccaaggatgaacttccttcttgacaaaatgactcatccacccgcccatttattcagcaaactatggaatgccctgtgtatacaggactcggggatagattttgtagaggactcgaaaagtccatgcctctctttgtttcttcagcagttatgaggaagggacaagaccatcgcgtctacatgtcacctggttgattcctcccagcctggtgacagacactcataccttcatatcttaggagaagtcaaagctcacgtctctgcctcttgacccaagaaggagttttcggttttgttcagctttctgcctttgtttaattttacttcctggtggtgatcaagctgaactttggatcgacttttaacactgcagagcacggtgtaatctaaggcccatgcaagtgagccttcaggtctctgaggtaacaggagtccttaccaaggtcctaggagggaatcacagagatgagatcacacttgcaaatgtttttgtgagatttccccaagtaatccatttttttttttgcattcttttgcttaaagacactgtcctaaatcaagtaacctcagaccttgtgtgatcagcatgtatctctgcatttgaaggtgggataaagaacacgtgagaaagaggtcagggctgtgcgagcaacaaaatgcagaacggtggacacacagggggagtcctggcagctttctgtactgtaacaggaacactgagataagcagcttctatgaaggccagagcttttatttgtggctcacagttgttgaaatctccagtccacctgtggtggggcagcgcatgctgtcaggaatgcttggcagatcaaataattgtgaaacaatggggagcactaggaaaggagccagggtctcacaattcccactcaaggtcatacccacagcaacctaacttgctcctgctaagttccactcctaagggtcccaccttaacccagtatcagcatgggctgggaaagcaagcctttttgagcatggcccttctctgccttagttacttctcctgttgctatgatcaaatactttgagaaaggatgggcatattgaggctcacaggaagcagagaaagaacaggaaatggggatgagttataaaatcagaggcaggaggattgccatgagttctaggccagccatggctacatatagtaatatcatgtctcaaaagaacaaacaaatggaggggaaaaaagagaggttggagagggtgcaggaaaaggagagcagtggcactattagggggcgtggccttgttggagtaggtgtggtcttgttggaggaaatgtgtcgccttgaggtctcatatatgctcaagccatggccactgaatcagaccacttcctgttgcctgcaagccaagatataggacacctggctaccttcccagcaccatgtttgcctcatgtcaccatgtttcaccatgatgataatggactaaacctctgaaaatgtaagtcacaccaattaagtgtgttttctttgtaagagttgccttggtcacggtgtctcctcacagcagtagaacccctactgagagagctagaaccctgttagtggccccaatactattttcacttaaataactaatgcaggctctttggagagtatctggaaatcccagaatctaagaatcacaaaggaaaatcacccacttcccttaccgatgacaaagttttggtgcctgtgtctggtgccaggcggcgggtgttcctaagcaagcacatgcagtagcagcttgggggatggacagagctcaacccattactctgtggtgaacttgggcatgtcacctcacccttggagtcttgcttcttctgtatcacagttcctgggaaccaacaagttcctgaagctgatgtgaggatttaagagtcactgtcaaatgcccaactcacagtaggtctcccagtcccaaagtgagtgagaacagacactcaggtcacaggcagtgaatgccatgatgtgtgggaatggacacccagagtgggtaagggagggtgggaagggcagccaggagtctctccaggccaggcctgggaaggcagtgacctccgcaccccatggctcctctctcccatctcactcccttccctccaggtcacagtgctggcaggatgcaggctgtgggtggtggagaaggtgggaagctgtgacagtaataccaacagtagctgtagtaatagctggcgccttcctggaggatcgctgtgtgccaggcacagagccaagccccttctcacctccccctcaactccaagaaagggggatggagaggtgggggggggttctgctccagcgtcgaggcctgtgagcgccctcctggagattgggagcctacatgaaaggtgcttgatccccatcagcaggcccacctcctggagacctgtgcaaccaagtcagtggcaaatgcatagcctctgatccacagtccagtcaggctcccgagagtaggaagctatttccatgaacctcaaatccacattcccaaggaaagcaagcacccccagccctagttcaggatggcaattaattgtaaactgagttctcaacacaaagaggagatgcaacagggctgaggccactggccaggttttgttcctgtgacaccggggaagcctggctcctgttggaaggcacacgcccagtcagaataattccactgtagttttctccatcaaacatgaagtggatatgaacatttccctgagccatgggtgatgaggggtacaaccatcccccttaccactctgagtagcaccaagagtcaggaagtacctcctatcttcactacagcccagctgtgtgactctgggccaatcacatcacctctctgggccgcatttttcttacctatataaacaagagatttgactgagttgaaaccctgctttgtggcttcaaagaccctcttcgggcatttcaacctgaatttctgggccatcgagtcaaggcgaaatttggttgggccaaagcttcttctagatgtggcgtcaaacatcgtggcagagatttatataagttagcgtgagattgtagggaatcagccagttaagaactatatggtagggctggtagggacattaaggcagtgaagtagggaatggattgctgaggagagtaggccacaaagaagaatgagcgaaatgtatcaagaggaatccatagttcagcttgccttttccagaactagacagtgccagcccccttggaatgcttgctgggtgagtgatgtacgaacaagtgatgtacgaacaagtgtacgccatcacagggacaagccaggcaagtgctcaaagtccaggtgctcagaccacccacctcgaagcttgctgcctttacagctggccatgccagttaccaggcaccaaaaagagaccctgctgcaggttccaggtcagtggagagggtccctctgaggacaggtcccaggggacagaggctgcaggtggagtgggaaagagaagtaagaggcaggcacagctgagccctggggaagtaccagccagaaaagggacaggccaagcaagaggaaggaggaggagctagcatatctgggggcccacaaggtgccaagtcatttagacccattccctactcacactatcatttaattctttcagggaatctgtgaaatggaaggaagctctgggacttgaacccagattttgacaaccttctttctgtctcccagggcggtctcctggggaaaagcagtatggggattcagatcagaatggaacattctgtctacagttcccgaatttccacaatgccagccaccctactgccccaccaccccaggtctattgactgaatagacctatgatctaagtgcttttgtccattccttgctctggtgagaccttaaccagctccctaccctctgccctgggccctggcagtgatctccagcagtgtagataacctgtagatagtagatactgtctactcccacaagataactagtatttctgttggaatgtacatggaaatgattctgcttccctggctccagagaccctaagagctggtcctgtccaacaacccagaacacactccctattcccctctccgttgtgggttggatggtagttcactaaaacatatgtcttcatctgagcactctggtcctgtgaatgtttgaggccagcctggggtacatgagaccccatcttaaagcaaagcaaaacacccatgctttctactgcacccctctttttcctatctttccattacccaagttcctttcctagaggaggacctcagagagatttccttgtaaaatcttcactgttctaacctttagaactctctagctctacttctacctctagaagacctgaactaagaccataataatttatgtcttattattgtccccaagctggcctaagcacagatcccctccccaggtcacctgggagcacagtctaagggaaacctacatacctcttcccttagaagttaaacacagggactcagaggctgccatcccctacctgttgagatcaccagctcaacagaaaggtaggaccatctctgtccatgtttgattgtctcataataaaaagagagtctattttatctggaattatgagaataaggccaagaaatgtaggaaaggaggaaagagaaaaatgagagtaaggccatcgcccaagagttctgtgccactctctctacctggttaccaccaagaccatcatcacctctggactcctcagttacatgagttaataaatcccgttcttttctgaatctggtctgagtcctttttctgtcacctgactgacacctaagtgtcttggctgagacaacacttccactatttaggcagtatcaactcagcggctctcgttcaaattgagttgctgaaatttctgttttaacacagaagttagacttgccatgctgcagacaatgcttctccatcttgaccctcagggatcaccttttgtatctttggagataggactgtggtggtttgaaggaaaatggccgccataggttcagatggagtaacactattagggggtgtggccttgttacagtgggtgtggcttgtggaggaagtgagtccctgtggggcacctttgaggtctcagatgttcaaggcaagccaagcgcacggtggcactttcttcctgctgtctgcctatctgaatgtagactctcagctacctctccagcatcatgtctgtctgcgtcctaccacccttcctgacatgatgacaataggctgaacttctgaactataagccagccccaattaaatgtttttctttataagaattgctgcagtcattgtgcctcttcacagcaatagaaaccttaagataggacaaagaacatctagggactggcacagcctgtgtctgtcttccagtttatgtggctctctttcctggtcactagacagaaggtctacctgaggcttggacactctttccaggaggcacacagtcatagaagctaacaccctgactgcggtcagtgtattgtgctctcagactccaagtacttcttgctcctccatggatccctgcgtttctaggtggagaacatacctttctcacccgtgccggggcagagctcttcgtggacacagagcctctcttctaggccccaaacaagtagagaggatgagccttctcagttctcagccccgattgtctgactacccactgctgggctcacaaggcacatgggtcagtattcagtgaaggagattagtgtgtgcagttgggctccatggactctgcagaatgagccaggtaaggacgttgcaaacatgcacgtggaaatgctccaagattatgaaatgataaggagggagttgacagggaaattaatttttcacagtgctttatcaaacatacattatttcacttagcgcttgaccgtgggttagaaagtaacggctgttacaccacaagggagaacatattattctcactaccaaataaatatcttttcatagtttccctttaaattcagtccagaaacatgatgggcccctattgttttgtcagactagcatcggcctcatttctgggaaccgtgtccctggctcctgggaactattcctctgcccccggccccctgaacacgcaggcccctctacatgcatatggcaccacgggagtctgcctgttggcacaatgggatgcactcttggccttggccattggtggagaggtggacacctgatccaagctgaccaatcagagccctcccccaagatttgggaactgcaactgacaaaaagaagtcagtctccctgtgagtgtctgaaaatgaagacatgtaaatgcagaagcagttggcagccctgttccaccatgtggactgaggaatagaaaatgccaatcagcagaaagagaagcagaggcaagagaaggagaacggatccagacagccactgagctgcgcggtctagctgctccccaggcccagccatattcctcttttggatcccaccgaatccacgtagccttatgacaaaaattcttttttggcttcgactaacttaagttggatgtctctcctttgcaaccccaagagttttaattcgtatgagagcatagccccatttcaatcttgcttccctgtcaggcttgaattcctcaatcattttactttttgacttcagaatggaaaagggaaaaatgcaaatcttttaattcgaccctcacacaaattaacctgcactcgttctcctggatggggtctaaacaggaaactcttccacctggaatggattacgaactccctaggagtacaggtgtggcatgaggttcttcaccaagaatttagtcttcttaagatctggttggagagacggctcagtgaataatgtatgtgctgcagaacctgaggacccaagtttaattcccagaatccacataaaacgtccatcgtggtagcaagcccgtccagccctgggaaggtagagacaggcaggagatcactgaggctatcaagccccagctcctagtgagagaccccgcccccaacaaagtgagagtggggtggcgattcagatcaggagtcctagcctttggaagactgaggcaggtgaatcgctataggtttgaggccagccagcataggctatgtaggagagcctgtctcacaaaaataatgacaacaacaaaggaaacaaaaacaaggtggatggctcctgagaagtaacacccaggttgatatatagcatgcacaaatatacatataacacacacacacacacacacacacagagagagagagagaggggggggaggtgagaatctgctcttctctaattttaaagattatgttcaacagaagcatgctcttttttaacaatctacctgacttaatgtggcctctgacctctagatctacaggaacccctttggccactggttgaaatcccacaaaccacatcagaggggcaagagtctgttgcccgatttcctttgacagctgcttaaggatcagaattagcctttttttttataggaaggctccgtggtgcaaggtggtttagagctgtccaaagaaagcgctgtggagaaactgagacagaaaatccctttgcaaaacaagggagagctgcttagttaggcgaactctctgtgttctgtgatccttaaaataaccaataatgaaatgtacaacatggccgattctgtctccatccaccttcttaagtgtggatacttagtgtcaacaaaataaaacaagctgcgaagtaagttcttgctatgtatttatttagaatctctagggctttccctgttaaaaaataaaagttaaccctgaacccactggacttgaccacagacaagaaagcatatgtttagcacatggctgacacatgtaaacgtgagtgcagtcagatattaaaatcccaccagccaggagaaaccctcccaaccctacccctgcccgcccttatcagagcaagcatgcctttgatcacacgggcctcagaagcctagccgtatattagtcaccgtttctactctaattggaaaatatttccctgttcaagttcaatcagcatttcagttaaataggtaaaagatgcccaagaacttagaggcgggaagaacctcagaggcatatctggctcaaaaggtttattttaaagatgaaaagataaagtcacttgtttaagacaacatggcttagttagcagagaacaagagggcagatttctcgtcacctcccttccttctggtttccggtctttagaagcaagacatttccagaaagctcccaagccctctctcttcagctcctggtcagtgctgcccgaggagaggctgtgaaggctttagaaatcaaggacacccctccagagaaggttgcggggcacagggggccagcgctgcaaaggcatgcctcgggagttctgctttcagggatgtggtccagctgtccttgcatcccctttgcacaggcaagcctcatactgccacagtcctgccacgcgctagcattgctgcaggagggttccaggagccctgggggatacatttaaaagatacctaggaaaacagagcagagatatcaccccatcggaaaggaaggcagcccgctgaaggtcaggaggatggatgcagggaccttgccccccccccgtgccctgccagcttcctcctataccccatcattggttgtggtggggcacgaggtaatccagtgacatggcgcacagaagtcacacagacacagacacacgtagaacagagggcccagttgctcggcagcttgagtgggaatgtgagaaaaatcctggggatttcacagcgcaggtggagttcggcacaaacaacctagagtgtcttgctaatcattagagatggcacctctgtaccatgtcaaaaagtaggattgcaggggcatttcctccgttttgaaaaagacactgtgccgataatgtaaatttgtttaagctcgagaagtacaacagaccaacgccagcttcccaggtaaggggttgggatgggaacttggcaccacagctcttcatggcatcacaccctctttcctctaagattcacacgcacacgctctcggctccatcttcttttgaacaataggcatgccccggacatgtgtgtttcggagctgcgggaagcacgcggacaggctttgctcgtccctgtcatctcactgtggatggttttccataccagttacctgaacagaggtgtcggctccacatcggctggccctgagaagaaaacagttctcaggcagctcctataaattacccctcttctcactttcgtatcaagtatgatatgtattagagtgcaggctttgggctagactcaagttggaaggctgtcaaataaaacacaaaatagaaaaataaatccaaagtgaaatttatgacatgatttttcctcccattacactccacttaacaaatgcatatgttttacaatatctttaataataattattaaacatagtaaaatacttccaaacttggctcattgcataattgtacttcgagtgaaaaaaaaattatctgaggccttgtcagaatgccacttcctcctcccccagcttttaacagaagcagcctccagtgggataatccaagctgtgttcaagaagttggcaagtaggtccaattaaatgtggttttactgtattctggcgtttgcatatctagtttgccaagaagtaatctttcacaaaaaaaagaagaaagaaagaagaaaagaaagacagaaaaaaagtctgtactggcccagaatcagactagatggcacaatgcatcctataactttaccccatgactaagataatctctttttttcttaaatagctatggaaaatgaaccatctatccatcatattcctgtatgaatcacaaatcaccatcctgtgtgggataacttacatttatacatgacaaaactggaactcatctcaatagttctgtttattttaattattaaactccaaggggttagtgcccagccacctgagcttgatgtatttattcaggtgtactccagtcggattatctgaatgaggctgtaaatgatcctattgactattaaatacccacttgtccaagcaggagctgtatacattcacaaacctgggtacctggaactgggaggggcgccgctctggttttgccgctgaaatgctaggcagttcctttgctggtgtttgactgccccgggccttcatggaggagctgactcgagcagtcctttcccgctaacccaggctctccatgaacggccggcggtatccaaagtccagatggaaagctgtcaacaaagagagtccttccgctctgcctactgcatgattcatccctggcatgaagacaggcccggagatggccccaccaccttgactcctgtaggtgagccaggcaaggagtacaggtgctcactctgcaggtcagcgggaagggatcaggtccgaaaaaaaggctgcaaaccccacaacctggcctttgttaccatccatcatgagctcattaaaaacacatgcagaaatggttaaacaaaaccctctaaaaccttttacaaaatcgccagtctattaggggagacagagcccgcagcgaactctccctccaatgtgtgcaacggagcagctaatgtcctttggactcttgtctatggcatcaagcaggggaaggttggggggttttttgttgttgttttttccccccggggagttgggggggtgtgcttgtttgttttggttgatgttagaggttttcttttttttcttttaaaaaacaaaatgattaaatatagcaacaaagaactgtttttttaacaaatttatattgttatgctcattgccttttacaaaaactgatgaaaatgataagattaaaaagggagattgtgtcatgataacaaggggggaggaagaaggaaagaaagaaaggaaggaaggaaaaaagaaaggaagaaaggaaaatagatgactgtggcccgattgcttttgtgaaggtggcatggcatcaaagagggaagtggtcagactgaatagggactctaaagccatccagtacttggccctgctacacacacacacacacacacacacacacacacacacacacacagacacacacacagacacacagacacacagacacacacacacacagacacacacagacacacacacagacacacacacacacacacacacacacacacacacacacacacacacacagttggcacatatcttagtactgagaagtgtctggatgaacacaacgtcgtattccactaccctgtggatttcatgcagaaacattaccctcccaagggatggactcacacccgtttgggtggcaccatggtgtgactgtaacgatgcaccgggcaggttggtgacttgaggcctgacgctgagatgctctgggctctgacctggcgtgtgctaccttctcctggttacagggagttgtgtgcttgtctgttgccattctgtatattcgtcatcctggttttatacttaacaatactccaatggacatcaatcatagctttccatctggttccttcagcattggggggcgggggaggcacaacatctgtatccagtgcagacttgacatagcagattctctctgagaagtcatcgatgttgtgccttcatcttccttttacctccccaaagaagtgatatggaagtggtgccctggattcatcaaaacgagcacagagaaatttgtcagaaggaacccaagtgtggcatcaatgagagaagaactgcacatgtgttcgcacccacaggcctccctgagagtgtgcaagcttttcaaaagcatgaccctttcacacagcctggagaaattgctttccatgatggcatgatgaaaataaagttgaaactattagtccttgatagacttttttttttttccccaagacagggtttctctgtgtagctttggagcctatcctagcactcgctctggagaccaggatggcgttgaactcacagagatcctcctgcctctgcctgccgagtgcagggactaaaggcatgtgccaccaacgcccggcaatggacttaaatttttaaaaagaaaaatctatagctgtatggtgggggcacacacctttaaccccagcacttgggaggcagaagcatgcagatctccgtgagtctgaggccagcctgctctacaaagcaagttccaggacagccagggctacacagagaaaccctgtctggaaaaacccaaattaaaaaataaataaataatagaaaaaaaaaagaaaaaatctacatcaaaaaaaaaatccacattgctgggaaggctttgtgatagaaaaaaaaactttcatattggtgtaaaaccaatttttttatagtagcattgttccctaaaatacacatagcatctttcctctgggagcgtagtgatgtgtacattcccgttcacattgtaccaaggaagaagtggtagggcattgtcattctgtcttagaaatggagaaatgagtgtggcagagtgggacccttcctgtgtggcatgaatgtgtctttctaactttccttcgaaggccctctccagtagatgatgtcgtgagaaggggtcagtaagggggaagcaacgccttctcccacatgggcagcagaggagttctgaggctcccgaaggcggccacctcagccctgaccacgcttctcttctgcctacccgtgtccagaagccctttggccattccctgtctgtgtctccctgcactgagcacggcctcactgtggctgaacaaacaacacagtttttgttttgttttctggaaacccaagcaactcattcctccctaggagcatgaagagaaagtgagagatgggaggatgctgtcaggtttcagtgctcgaggtgaaggagaggtcaaaccccccagcccccagcagagggtgcccgccctgctgtccagagatgatgactgggcccaagtggaggaaaggacgacattccagcttagactcccataggcactgtttgtggcagaccatggtaaggtaaccatggcacagattacaatgagagcttgatcacagaggtgtgatcaggacggagaatcagattcatccttgatcaaagatgaacctaaagcaagggatttgatttgaccgtcctgtgcctctaaagagagaagacgtccatctttaaaatgatacccaccccccaggcaaggacgtgagtccacttctctctccgacacctcgtctggacctgtttctcaccagagtgaatgacttggaagtcagtctctttgtgggagaacacgcatggcagcaacctgtgaggagagactatcagacgaacaccacagactttgacaccgtgaagaattcctgagctattcagtcctaagatttccataatttgaacaacaaaactaatttattattttaaagacaatcaattcagaatgtaaataatcagaatagagatgcagatttaagttttgatttgtgtcttgcttataaagcttaactgttatttttggagagattaaaaatatatgtattattaaataaaaacaacatgagggttgatagcctcattctttgagggtgttatttgactgacttttaaacaacaacacatcaatcatttaaaaccctccatactggtcaagcctacagagtgcctgtcatattgtcactacagtattatttttactgccagataagcacctttactcggcactgagtaaatgatgacaaacctcccctccctccccctgtgcacagaagtggttctagcaaggcttcaaggcatccctcaaggaaaataacatataaatagaacgtgagaaaccaccacgtttttctagacttcacacttactatgaaaagcaaaagttctttgtgccccaacatatcctctaatttctctgccttttgctgaaggttttcatccagtttgatgtcatttattgtaaggagccccagaaatgcctcagctcctttatcttccagctcaggccccctgcctgggtatattaacacatatctagctggtacccagggtggtaaataggccaatctaagttagagttctcatttcaaatttgtgtgccccccctccccgaaatgatagaaagacatgaaaacgacttgtctggaaaactcagttgtgccatgctgtcagaatcactttgatgaataaactttaccctcttggagtaaataaaaggacatagagaaaactagaaaacagaataccaggtaagaatttcagtttttgcttcagcaatagtcagcctcaaggagacactcacccagaagacatcagtttttcttagattattcacttacaaaatcttggagctttggaagaaattttaaattttacatacataaaagactcgtatcctatgattgtatgttggccagaaacctgtgtcgtttctccctccttccatactgaatctagaacctttttttgtcaaagccaggtagaaataacttaacaaatctgattttcttcagatatagttttctcactttctttcttctttctttttctttctctttctttctttctcttccttccttcccttcatttcccccaatttcttctatttgaaaagattttaagtgatagaaaaactgttttaaattagaaaatgggatttcttttcttttcttttgttttttaactaaatacacatagatgtcactaacatctatggtagctccagttcaccggccatagacactttccttcagtactataattattgtactagtgtgcttctccccaaatggtccacgctgacctgcttaggagacattgctgtgtagtaaacatgcaaatgtttcagtattaccaagcaactatgtgtgctacagtttcaaagataaggtttacagaaaaggcacttgtatattttcaacctcttaaaaatgtttttaaagagatttgaaagaaaagcttaaatgcttttactttgatcaaagctcaggtcatgagaaacacaaaatgttagactcattaataatcctctcggattttaaggtgacccacatcaagcatgtttttcttcagtgaaatgtacatattctttttctaggtttgagtaaataaattcatacatgcatgattgagtcacatcttctaagttctgtcacttatcaaaagttagctctggtctggcatgacacataaaatcatgctactctttcaagttcaatggcatctacacattttctatattaaaacagatttaatctatttgcacacatgtttaccaatattaaaacacattctttcatgctccacttcatatgaattacaagtacacttttgacaaacttgtatatttgggacaataacttttaaaaatttctatacagtcacactaggcatgcacattgacacttaacaaaagtcacctgatttaatgattaactacaaagatcatgacaaactgtatgcggctggtttcagtgaacagattctctgagtgacacagggactctcaaagccaccctgcacacactcattgaaaccgttcctgactcagtgtgctacattttaaaaccaaatggtttctgtgttgttttgtttttccctctccttcctcaaaaagacaatgcttcctagaacctaatacctaatagcaaatccagtcctaaagctcagagaagaacataacttattgtgggaatgaagaccacaaactcaagatcatctttggttttaaaagatattgttaaagctaccctgccaactaaagaaaagtatcattccacataaagttagaaattgaaatgaaattagtaaacatcagaatagaattgggaaaggtaactgggtacttcaccattctccttgaacccctcccaggcaaaaaaaaaaaaaaaaaaaaaaaggctgatctctttcaagagcttgaatgtcctaggagaagaaaactattctatatgtctgcactacctggagaattaattataacttatttagcataagcagagacatgataaaggatttggatttttaaagaaaaaaagaactgttcaaactattgctattcgttgattcatttctacacagccaacctgtctcctcacagtgttgcacatttggagttcagtttcttccacaagaagtcacagaagtcgataggggaggatttttattttaaaggtactggtttgaaaaaaaaaaagccaaaatcttaatttttgaagtttctcttaaaatgaatttctgaaagctctcaattttgtccctaagatgtcactcctctgctgccattctctagggctgatgagcagggtggagtctttgacagagctaaaatgacttgaagtccgataagggaacggcttgtctagaccaagggatcacagagattttgccaggattctgcaggcaaaaggtagaaaaaaaaattctaacataagggacaaaatcctgtcagtataataaagttggactctggccaaaatgaaattcctaaaagccaattgcttttaaaaaataaaaccagtgctttatttttttaagatgacattatctctagtttttaatggcagaggacaactgtaatgaaaatgacacagcttttctgtcctgaacttcaaaatcattctcacttcatcaactataccttatcagcaacttcaaacattgtaataattataatcgaaatttagataattatctacaattaaaaatttctacccagagagaggtatgtgcaatttccattattaggttagaactcaaagatcttaaattttatagaaatgaaatagttaaacagtgcaggaaattttgagatattaagatatttaatttgtatccaatttttaaaaatggagtttctcaagtttttttttttttttaaatgtatttaatgtgtgttttatctgtaaaaccaggaagttcaagacttttcaagtagaattgcttcttaggttaaaaaacacacacatacacacacacacaccaaaaaaaaaaaaaaaacccaaaaaacaaaaacaacaacaaaaaaaaaaacccaactatttcttttatagtatttcaaaacaaaaatatacttgggaaaacaagcattttaaatatttattaatttaatgtgagttcatacatacttttaatataatgttcacctttttctaaccttccaaaaacctgtttttagagactcatgtaaagtatgttaagggaacactctacttgattcacctattaatccgatagtgtaattaactaggaaggaaatccccaacctgcatccttagcgacttctacttgtcggctattccccagggtacacctagcacacaatgctgggcccacagcaatccagggcataattgattacctgaaagaaacagatgttttcaaaagtaagtgaaaccatatttttactacgcatttagggatcagccagatgtcaaaggagggcctgatttttgcaggtttccgactggtttagatgacaactttctttcttcaatgcagtgaatcaacaacagattcttgcatgtcacatgccaaatgtgaccatttgtgtaaaaatatgctatgcctattctacagtattttaaagttattcccaagtcataatcagcatgctgtgttaaggagtacaacctgtgaagcccactaaggtggctcgcttaaaattagacagtcaatgggactgatacatcaaccttcaagatcttcgggaagctttaacatacaggaaaaaggaaggcatctctccgtttcacttgctaactgctcaaggaattgttctgtagaggtcaaatgtgaaatgttcagttgtctaaaacccatggttgaactgttacattgtttgttccattagaaattgaatgtatcaactgcaaatttttgattgtattttatgataaaaatttttgtgggttgctagtgaaagccaccgaagtcctagagggtatgtttcacactctggatcccccaagaatagtaagcttaccgtgggctttttggtgtaatcctatcttagacagtagttatgtaaaactattatttccatttgtccttaggattgggagttacaggtaaaagattcattatttacacaacctcagcaatcttcagccagtgtgccaatttccccagagtcccatgtacatgtgttctgtcaattctgcgggccaaccaacccttaccagacacatacccaaccagacaggcaagaaattggggctggggcaatgacaaagaggagggaatagttctttctaatgatgccttgcttaaatatgtttaaattagaacataaacactaagagatcttttgagttctggtaagaaaaatggacatacacagctaatcttgaacaaccaaatgtctgataattcgattgcctagacttccactcattagccaagcagtgttccaaattaagacatccggtctccttcaattttccacttaaaccagaacatgggagaatagatttgaccaatcaacttaggataaaaccatgcatggaaagtgacttgcattgtatatgggttaacagttgtgtgacttaatatgaaaaacctaccctgctacttgaagttctttatagtcacagttttctagggaactgcctcaacagtctgatctacactatagaaatgggtcatatttttaaatgtgcatttagtgtcttcttaaatgatgagaacatgcacatttccacttgggtgatcctaaagcattctagtaacttcataacctcaataaaactgatattaaaatgaagatgccacgcactatacaaacttcaaaatctgtaatgtgatcataatacaaaaaccacacaggcaattctcagttcatataatttattgcagttagcacacagtttaaaaattcaccaacacaccaatagtacaaaactaaacagcattataagttattccccctcaggaaataaaacatactatgattgtcaaagctagatgtcagtctaagatttagaacaaaggaagaatgtgaaactaagaaaaagaaaaagcaatcactcacaatgaccacaaaaaaaaattcaaaaaaagtccgttctctcacagacattgattgtcttctctaaattaataaagattattttaacataaactgtattaaaaaaaaaacaaaaaactagaaactcttcaagtaactaaagataatgctcaaggccatcttcacagctttgtttgtttgtttgtttgctttaaatgccattacagccaaattaacatacatttgaccaaatatttccaaaacagtccagcaacacacaatggagttttccattcagtatcttaagcacaaaaataggctatgtttacagtagttaaggcgatcaaattttaaacaaaagcaattaaaaaagaaaaagggaaaaacaacaaacattttccatgctactcccatagaccttatttgtaagtgcaagacaggaaaacaaacactgtgcaaaatgcttctcccctgcgtgctggtcattaaaaccacacggtgggctgcagcctctgctgccgatacacatagtctactaacccccttccccacgtcaatcaaggcagttcagtcctttcagcctggggctttttcagtccatagaatcttttcatgagttagggggtagggggaaggaaaggaaataggggagaaaaagaaaagggaagcaaaaaggagagagagagagagagaatgacctatgacctattgtcaatttgtgcagtagttattctaaaaatgctcagctgggtacatgggtacacctaaactctgagctggcatgggttctgtgcaattacaagtgtgttataaatgcacactgcacatgcaaatctttaagccgtttgtaaacatttatatgttccttgtaatgtagcgaagttatcaatttgcagcttaagtttttattcagcttaacagtttcaacttaaagacagtgggaaaagtcaatttaaattatataaaataaaataaaaacagtgcatttacgttcttcgtaacaccagtttttttccccaaatggtgctaattttctaaggaaattaaataattttaaactcactcgttaaagttatacaatgcaaacaaagacaaaaaatatattgaaactcatgcatttctgtagcgttaatatttacttttcaagactcaactaagagcatcaacacaacctgtcaagttctttgacacccccccagcccgtgtaatcaattacagtatacaagaacagtaattcacattttaaacacacagttcaacactgctgaagctgcaataccctttttcatctcaagcaaaccttcacagagacagtcccagtgacccagtgtactgtcacaagttctctcactgggaactgtcagaaaaccagaagttgccacagaaagttttaagtcaactgcttgtttaaaaatagataatccagcatttcagaaattttccatttgggtctaaaagcattcaggtttccaacagccagaaaatattcatgcaatttgagacatataaagaggctaataaaactggagggaatttctactttgaaaacaaaacaaaacaaaacaacgtggggcacaagaaaagcgctcaagacaatgcagtgtttacaaaatgaagccataggaaagcattttgtgacagaaccatttgctgagaaggatttattggctaacttggcctacccttcaaaggaaagacacctctctacttttgactcgctctaaagtttcttttatcagaatgctaaattagtgagattctcatgctattattctaaagtgcaaaaacaagttaagatcccaacttttcagttccaggaaacaagactgcttttagaccgtaccacaactatatagagatctatgtatatatatgtatatatatatatatatatatattatttatatatatatataaaattatttccaaagttcttgagagctatcttctaaggtccagtctctgacagtgggcaagctcagtgcttcacttttgaccgacaaggagttcaccaactcacagtggaacttgcggatgtgtctgtacaggtctcccgactgcgtgaacctgcgctcgcaccacttgcaggcgtggggcttctcacgggtgtgcaccacggcgtggcggctcaggttgtgcgagtactggaaactcttgccgcactgggtgcacgtgtagggcttctcccccgagtgagtcctctcgtggcgcttgagggtgtacatgcaggagaaagtcttcccacacagggagcacgtgggcacattgacatcggcggcaggcttgctgcggatgccatcctgctctcggaagtgcgtgctcaggtggatctgcaggatgtgggggctggggaagactttgttgcacagggggcacatgaagatctggcctgcagggctcaggatattggagacatagggaagcaggctgctctccatgcccccttccacctggacccgatcgctctctggggtcatcatctcatcatcgctggctttgtcctcccgatccagctccctcaagaccgagtcctccctcagaggagccaggtgggccggctcatactgtaccctgttgttagtgctcacactctctttcacagtgctatgttccatgtcataatcattagtgccaacatcactctcatcacaggacgcctctttctccaccttcacctgcaccaggttgcttctcagcacgtcctgtgaagagaaataagagctgttcagattttcaactcccgaaaggctggacttgacagacaggtccagcacacagtcaacatctgccgaatccctcacggaggtgacagacctctgggacaaagactctgttgagctgcaggggctggctactgtttttccagctgctgtggcgtgtggctcggcctctccgccagcctgggggatgcctgctgagtctgagggcaatcgcatccacatgttcccaggctcagctgccaagtcccttttgctgggtagaatgttcaatttctcatcttcgccttcatcttcatcactgggcaggtcacctgccatgtggctgctgccgtctgagaggctctcgactttgtcagaacaacttgaagcgtcttcttcttttttggtgctgtctgcctcggtggtagctttctccttcagcttctttttgcagactttgacaatgtcgtacatgtggagataactggcagctgctagcacgtcctcaatgggcaagtctttgaactggagtttcccttcgtacatgaattcaagcaggagagcgaaagcgggggctgtcacaatgtcgctgttcagatgaacaatgtctcttttgtccagctggtccttgtaaaagaggtggaaatacatgctgcatgaagccagcacagctcggtgcgcccggaactgggcatctcccaccagaacagtgcagtcacaaagaaagccctggtgtctctgctcgctcagacactgcagcaaatgtctgctgtggtctggaaactccatactgtcttcataacctggggaaagaggagggtctcgttagagcctgcttactagtttagcctctagtttccagtttaaaaaaaaaaaaaatccgccttagtggtggagagttccatgtctatgaattttaaatcaggatcacaccccaaaggactcccaagtcacacatgcgacctaaatgcacttgccaaggactctcacccttctcagaactcctggtcgagttaaagacttcctttagctacagcctattactgagaccaagaattcagacctcttccagaagagatttaaccaactactcatcaaacgacatcccacaaaacctacaagacagctttaacttcaaaaggaagaacccacaataacaaggcaaagtcccacacaaattttggaagagtgaagaaaacttgcccaaccattctttttattttatcacttttcatacctgactactgcaaagtgaagactgaacacacacacatttggttgaattgggaagcggaaaaggggaatgaaattgcataattagtccagaaatcagcaaacaacttactttttaaagtcagagtgttacaacaacaaaagccctgtgtataagaacagatgttggtgcgtaagatttgcaggtactgcacaggcaggagatcagatggaactgcaccgacagatgggaaaggtcatcttactatgaacaaatccaaacatttttaaaatgaatggggggggggctgtttctttgtagaacaatattattagcaaccagagaggctgttaactctgaaaattctcatctaaactttgatctgctacagggttaaaacaaactccatattaaaattaatcaaacttttaccactataaaataaggtgcaaaaactttataggttcaatatttagtaatttgaaaagccttcctagaaaaaaacactttttccccggctctgccttacctcaccaacagaaaatactttgtttcaataataactggatatatcttgttttcccagtagttctgttctttcaattatgcatctttgccttgttttctggcaagggagggcagtgaaggagggaaggcaagactgggtcaaaatccaactgtggtggagaaagataaagagagcccacttcctcaccctgtgaacagaagcagggctcccatccacccaccacaccaagtgcagctgagggtgggtatggagttaacattcagaaccagcttccctccttgtcctcaccatgctgagacagtgaaactctcatcctaaccccagataccttctggaagacaccaccactagaatgaaccaagatttacaatacaatcactttaagtgccccacagctaacatcaatcccaaccctggagagggctaaaaataaagactggaggccagctcacaaggtagccgtgatcaaattaggaggctgagaggacagagagggacgaagaaggaagcttataaacatctgatccagctgactgtggccatatggcagctgctgcccagataaagagattaagaatagaggagtgcgattacagctgtctggccaattcaggcagctcgaatctacaagttctaaattagtcgctaacgcagaaactcctgcaaataattattgttacgctgaaataaaagatctcttaaatatatatctgaaagagaaatgaggaaactggtcaaactattctcctagggataaaagttgtctttctttttcttctcccctcttcttaaaaaacaaaaacaaaaaaatcccaacaacaaaaaccctccggtttcaaaagcactacagctgtatgctgctttcagtaatgcttgccgaatgttttggagaataaagtttcacagtggaattaattacacaacaacctagcttcttaaccagaataatcttctcatataagtttgaaagctggattccagacagtttactgtttctgcccccctaaagcaaaaggaatctaaacagcagtgaacaacaaaaggcatcttaatccaaagtgatctcaaaaagccatattccaaagcctttcttaccatctgaaaacttgaaatatttctgtgtattaaagttatttacttgctcaaagaaaagaaataaaaattcaaaccaagcaagcccaagacttccagctcaagaccatcacttcatgctcaatttcacacattattcataaagtggattacaaaagtaatgtgatgtttttttaaaaaaattaaataaaacacccaaacagaaagatgctcaatctaatctcttgctactcctacctttaggacacataaacttgattaagtccttccctcggagtcttgctggctccaggtctgttacatcggtggaaaaaaagcagactaagagagacagatgcaaagtggagatgatgttggagaggaatgagataccttctccaccacagatccgcacacactagctccctgtctgtgtgttagaataaaaggctgagggatggcaggctgtcagctgctctgacatcatgttcagatggaaatgctacctccagctgtgctcctttaatgccatatgctactcctctacactcctgccaccagctttttcttaggagaacttttctcttctgttagtataaacaaaatacttcaaagtcttcctttttttccccccaaactttctaacagaagaaattgaaaaactcagcatatggagtcctactgtatttatggaatcgcaacacttctgcctcaagttggtggactggcttacatatgacagcacactcaggctcggtgctattcaggaaacccacattcacttttattcaactccaacgtctagtttcaaaggcagcttagggatatttttaaaccaacccatttgacatctccagccccacttcggcattattacagcatgtttttttttttcctccccccgcggagataatggtagacatctccaaaatgttggcagacttattaagagctattacttcagcgtggttcaccttattatttcactcttacttagcaacttatctgcaactacctcccaggaaaataattcacactgccaccgtgaatgcagatttccattctcagcgtcaacaaactgaaactgcactttgtgaaatcctggaaagtatttcggttcaataaaggcaaattaataaaccgacacaacctgctgcagtcacttaggatgactgtttggccacatctcatgtttctgctcagaaaaaggcgtcactttgtcttgcccttcttccctatccctttgggctaaagggttgtgatcagcaggagtgtagactttgggaactttcttggctggagtttgtgggtcttagtttctaatggctgatgaaatgctaaggtaacccgggctgggccgcccggttccctgcaaggtgctgcgacaactatgaatgtcagacacatctatctctacagactcttgggaggtcgaggagtagaaaaaagaaactggggcctgaggcgcaaacgtcccaacccgggcgacagccactcttaggctcgccttagaaaacggaggcagggagctagagaacaaaaccccaactctgtcctgccctcgctcacgagtcactaagaaacctaactttctctaacttcgcggtgaatgacataattctgaactcgttctggaggcacactgggcagacacattacttccctgctacacacaccctcttctccgcggatgccctcgccccattccaatatatccgacgttaatcaccccgtttactcactggggtgatggtgggggtgagtgacagtttaatgagccccaaggaccgcaatggcccggagacatcccgtccaagtctcgctaccgcggacccgcgggggctctgtgaggtttggggttttgtttctcagaggtgggggcagggtgccccgggtgtgtttgaggttttggggtggaggggggggatgcaaatcttcgcgcagttcgccgtgcataaagcacttggggaaagaggaagggtgaaaccactgggaaggaggtgcagggcagagagccggtgcagcaggaaaacaccttccacaacggccgagaaaacagccccgggtcgcggcaacaacaaaagaaaagtcgcaagaagcggcgcggcgaccgctccccgccgccgccgccgccgcgcgccagccccgggcctcccggcaaccgcaacccgggcgccgcgccctcccccccggccctgcagctgcaccggccccggagccgcggccgtcccgggcgctgcagctgcggcggcccggacccctccccgcccgctcgcccgcccgcccgccgccctccgcacgggaggcgccgccgcagtgcaccggccgccccgcgccgcagctgccggggagcgcggccaggcgaggcgaggcgaggcgagcccgcaccgcaccgcaccgcaccgccgccgccccctccgccgcactaactaactcccccggcgggacccacggccggcagcggggcagggcggggcggggactcacacggagcggccgagtcgccgcgtccccgccgccgtcctcctcctcctcctcctctgccgccgccgctggacttgtgggcgtcctccgccggcccccgcccgccgccggccccggcccgggcccgcgcgcccccgccgcccccgcccgcgtggcagcctgaggcgcgccgccgagccacgggccactctttaacggccatcaggcagccccagcgcggccgcagcctgccagacgtacgggcgcggagcgggcggcgggcgggcggcgggcgcggcgggcgggcgagcgcggcgccgggccggcggcgggcggggcgggcggacgacgcacacgcacgcacgccgcggcgcgcggcccagatgtggccccgcccggccgggccgccccgcgccggccgctcggcgattgagcgaaagcggcgggccccggtcgctggcccgccctcggtcgcagcgttgcccaatagaagagcggcgtgacggggtgggcggaggggcggcgggactgacggggaagctcggccaatggcagtggcgggtaggagctgccgcccgcgcgcgccaatcgcagggggcgactgttgggtgggcgtggcctcttcgagggggaggcggagtccgcgggccgcggcggcggcggcggcgctggcgctggcggcggcggcggcagcggcgcccctctgggtgacttggccgtgagaaagtgaaaggagcccgcaggcggcggcgacagctgcgcggggaggggcctgtttccaggctggagacgagcgcgttctgggggtgtggagtgagagagtgagtctgcgtgcaccgcgacggcctcgagtgtacttttacacggggcaggtgtcccggggaggcagtgcgcgcggggccgcagctggccggggccggcctggggcggctgggtctggccctcctgcggtgctcgcttgggccgcgtcccggggacgcgccgcgccgcgccgcctccggcctgtggtgtcggccgccaggtgcacgggggccgccagctcggagcggctgcgagaggcgctttttcccagcgtccttcgtgcaagttgcagctgcgtttctcctcccgatccccgcgtcccgtctgcacgcacggtgacaagcaaagacagtgcccagagaccagtctgagagctttccagggggaatgagacttgtagacgctttagcctgtttcttaattgatgctcaacgagccacggctttgccgaggggagagacgttaattttgtgtggcgctcccctcccttcagataaacttcctccgcctgtacctgttccttggagctgtgttgatcagtgccacagcaaggaggaaatgtagaaggtttctgctctcaagacaatggaaggaaagaataacacacaagtaaaaagttgagtaatgaattgggaggggggtgggtcaagacaataaaacagaaaactgcatagcgaggaagtcaacacactagtaattgtctaaatgaaatgtgtttactctctgctaagtgaacccaaactggcaagccctgttgctaaccagctcgataggagaccttgcagctgagcaaaatctttctctctcttccgggtcaaacgggtgtaaagaagttgaaagtagttgttgggcaaatcagacattgactcgctaatgaagaaatacacacacagagtacccaggagtttagaaatttgatattctgttagaaatggtaatggtttctactccttcttcaactcttacgttctcatgatggatttcagggaaggggtgcggtttacacctgtttcagatccgacccaaatttcttactccatgcttcccagaagaaatgagacccaatctcaatcggtttcaagctatatgagtttacaagtgtcatttggtttggtttggttttttgagacagggtctttctactgtcctggaatttgttatgtagaccaggcaggcaagcctctaaaagacatctgcctgcctctgcctcccaagtgctggcatcagtgggccaccgtacccggctgcaggtattcttgatgaatgaaacacactttaaaaacatgaaaaggaatatatatgtttcatggagaattccatgaaaggaaaaaggcgtttgtattcataaagtcatttctcaccaattaaaagttaacaataagtgaatacacaaagtaactgataaggccagactatcaaccataaatttataagaaaattgggacattcagatcatccaccaaagcttacactcagttttattgtccccagagggaaatcacagctctgacaatgggttatagaaatggtcccagagaaggacaggagacactggtggatcaaaagtcataaatatggcttgttttatttgggggctcttttccttctaagccataattagtatccattttgagaactgaaaaatatgtccaggaaatacagactaaatggatatttaaggaagccagtctgtcaccccttattgctgtgacagtcttatccaaggtccctggtacaattgtattttctctgcctcccccaaccccagcttcattttaactgttttaaaaacttattgcccaaatggtattttcagttctggttgaaaaatcatcaacatgcaaaatacaaagtatgactagcaccagaggtacctatacagaagggctactgtatctgcatccattgggtccataaaaggtaaaaaatcaagagtcccaaataattccttgggtatgtttctgaagctgagatctgccccacagagagacttgatgacaaaaagagttcattgttttaaagctagtagactacccacaacatacagtgaaaacaaataggcaaaaaataataatacccaacactaatctattggggaaaatacaccattgctttctctctgaaagagtggcattggtgcgcatttctgattcactcaagcttttctgggagttctgaaataaaaaaaaaaagataaaagagatttttccataggaaacaagttttacatttttatgacataggtgtcaaacagtaacaatctaacaaatgttgacagatcaaataaaatttgatttgatgagcagctccataaagtgaatgtctggttttttaaatgtgaatcacaagttagagctttgaaaaaccatcattgattctattgcaggtagcataatcatgttaaaagttatggaagtaaattttaaatattgggtttataaacttaacaatttcatgcatggttgaaatttttccttaaaaacgtagaattagaagcaaacaatagaagatcagataacccaaggtgtgagatttataactgttacaggtgtcaaagtatgaatagaatttaacctgatcatttattatttatttatttattttagataagcacttcctgtattgcgtacattgcccttgaacatctagaatcaaaaagctgtccggcttccacaccccaagatggctcccatgcttggttctgattttaatctgtagatgtatagaggaaaggcacaataaagtaaaaagtttgttcaaactattataaaacccactactttccatagctatttatttttgagacaggtttgtaatcctgcctcagcctcgcaggggctgcaattataagcaggtgccatgatacccctcccccccaaaaaacaaacaaactcttttgtggctcttaggaaagagcaggttaatgcagtctgaagggaggaataggcacagaaacacagttgcaacaatgattttaaataaatgaactggaattcacatcacaaatagtgaacaagaagtgtattccctaatgtgtctgtctgtctatagtgtgtgtgtgtgtgtgtgtgtgtctgtgaaaaatacacttggggccattgaggagactcatcgggtaaaaaccctggctgcataaacctgaagacccacattttttaaaaagcctgattgggggatagggtggagggcatctgtagctccagagcccctatagtgagaggctagagaatcatctagcttgagggctagctagcctggggtaggctgtaccccaacaacatgtaaggtaagagcctactcctggaagttattctctaacctccacatgtatagtatggcatgcatacacctgcattcacacacatacaaaacagataaaaatatttctctttaaagatagggtctcactatgtggcccttattagtcttgaacttgctgtatagaccagggtagccttgagctcacagagaacgtctgcctctgcctactaagtgctgggattaaaggctgcaacatcatattcaaccagtaagaatgttttgaaacacttaaatacatatacacacatttataattctgtagaacacatataccaaatcatttcccaggctatagattgtgtggttaggaacctacacattaaattctcaaagtgtgattgcccagcattggagataattcctttagattgacagccccaaagccagaaatagtgttagaaactcttgaggaaagacccttgctcggggtacagggccagtgacatcacctctgtgctgagagcagagggagctacatcagtaattcaaaacagctgagggttaagggcaagagacgcaagcaatgacgtcttcccccaacggtttttcctgtgcagcaagttcccagctgcctactgtaaaccggagctctgatagcatagtggctgaaggaggccaatagttcaggctttcttgggaccagagcaggttacttcagagactttaggaagaaagcaaatctgtgtcagtagcttttcaacccataatccctttcctcagcttcttttctctcactttcacgaagtattttatgccttatgtcataaggaagtttagagaagcatacagtggtgatttataggcaaccttgttcctgctttatgtgtacccatcgtttgcttcatatataatcccagaccactctccccctacccccttagtcacactggtagatggaactcagggcctgtgtgtgctaggcaagtgccatgccacccatccacatctctagcttcaccctaagctgactgcctttcttactcaacaaaaagcctcctacaatctcttcatgggagtttaatcagcatttatttaagggtcaacctaaacaaaatgagcgggtacaggcaaagctaccatccttgaagattacactcagcctcctgaaacccaacgttgaaatcctgcaggcacattaatctgcatcactaaaaggtgcactcacttcatctgtcagtttttcttccctagacagaattattggtaataatctcacttacataacttttccaagtgagaaagcctctagcaagaaagatttaatatgaccttagagatgaaaggcatcccacaaagtatgtaataaaagtacaaaggtgtaaatgctagtgttcacaatgctgtttgccacttctgctgggctgtgttgaaatacagagagcaaacggacacagaagaacccagtgacgtcttttcttcactttaaagggggggcaggagtgaggggcatgggacatggggtgagtgggggggaactacacacttgttctacttcaggtgctgaacaaaagacagaaacagcatctacccacctgcattccaaacagggtggaaaggctctctctgatctgctttatttctgttcttcatggactcaagcaggcagagaaggaaagagataaagatacattccagggttattgattgagcgctcgcaatgcatcagagaaacaaatatggacccacattctcatgggtcctgtagaatttctgctgtgtgctaggtgccaacaacacgtggattagcattaccccttttatttattatgtataaatgtcatgattcttatttcggtggttagtctattgatgtctcataagtgtgtaccaataccaaccatcataaaaaataacaaaaaaaaaacccgaaaatccttgtcattaaaatctttggggataaagaaattctaaacatttaacacagaagtcttcatacataccaaattcaaactagtctctgtaataagagcagacagaaggttaaatctcactccagaatttactttgcccttagcgatcacatgcaattcaggaagttacttcctttacaaagaaccagcatttatgcttaagactaaaatgattatttttaaagagcccattttacaatgcaaatgtgtatctaaattaaacccagtaaaaaaaaataagcatcttaaattgaatctacagtaatgactttatgggagacaataggaaaagtggttctgcagtatgaactcagagaaaacattttaaatcctgtttggggactcccccccgcaccatgtatgttaatgtctagcacagcttgctctgagaacccatttctcagaagttgctttgtagcattgaggctattcaaccagatcatacccaaaaggaaacattgggtaaaaaataacaagcaatcaggtttggtggggcaagccactactcccagcactcagaagacagacactagagaatcaaaattcaaggctaccatggtctacatagagagttccagatcagccaggattaagcagagactctgtctcaaacaaacaacaacaaaacaaacccagctgacagccagtctacaatgccaagccataccttagcatttggaatagaggacagttgcagagacaccagctccctaaaacagaatagccggtcacaagagaacagggaacaaggacacactcacaataggatattttagacagagacaaatgcaggccgagaagagcagtataagaggcactagcctccccgagtgggagggagggcttaaagaagaccaagaagacggtgactataggttagctgaagatgtggagaaatggcaagaccctaaggggaagagggtgctggtccatgcatggtggagaaggcgcacagagaagcaatggccacagcaacgtaaataaagcagacatcaacactccttccagggctctgctcaccacttcctctaccttttctgaacccttgtctgttaattgcctttaaataatgctttgagaagaagttgctagtgccccccctgggggggggtgcagagactagaatacactttgtattgaacttctcctaggcacaaagtgtgtctgtgttggttcccacacacttgtatgccttgctcatttggtaagttgatttttctgatgaaacctgcttagtacaatctagattttcttaagatgggctcagtgattgttgctttagcacaccgattattgctttatattgaccctatagggaaaatgtgggcccgtgttgacttttcaatgaggaatatgaacattttttttgtttttggaaacagggtttttctgtgtgacagccttagctgtcctggaactgtctttgtagagcaggctagcctcaaactcatagagatccgtcagcctctgcctcccgagtgctgggattaaaagcatgtgccaccatgcccagctgaaatgttttttttaaagataattaatcatattttaaaataaattacttaatttgacagtcactgaatccctatattacaggatctgggactaggggtattattcaatgtcagttgctgagcaaaagacagaaacagcgtctacccacctgccttccaaacagggtgggaaggctctctctgatctgctttatttctatcctacatggactgaagcaggcagagaaggaaagagatgaagatatattccaaagtttgattgagcacttgcaatgcgttggagaaacaaatatgggcctataacctcatgtgtcctgtagaatttctgctgtgtgctaggcagaacatttgacccaaggcttcctactgggtgcataaattaactttgggaagaagtttgtagaggctagagcaggggttctcagcctgtgggccatgaccctttggggagttgaatgacctttttacaggggtcacctaagaccaccggaaaatgcagatatttgcgttacaatttgtaacaccagcaaaattacaattatgaagtaacaattaaaataattttatgattgggtgtccctacaacatgaggaagtgtattaaagggtcacagcattgggaaggttgagaaccactgggctagagagatgctttagctggtaaaaccttgtattgcccttccggaggacggcaactccagctccacacaatctaatgttctcttcttgcctctgaggtcaccccttccacatacacacaaacacataatcaaaaaaaaaaatcaaataaatctaagtattttaaaaaaataacgttgaactactttgataacacaacccaggaaaatttgtccagtctaagatacttttccacttttccttttcagtttgttttgtttcagtactagggcttgtgcaagctaagctgtgcgctaccatagaaccacactccacatccagtggctagttttcttccctgtccttttttgtaggatttttctattgtttgagcatttgtgccctgagcatacaggatgtggcttgacaggaaataggcaagaaatagtttcaagaagaaagggaagaaagaacacacagaaaataaaccttttcatttttttggagtcttcaggtaagagcactgttttatacagctgaaacatctttcaaactacaaaacttgggacagtgtgagaagcagaatttactttgtaaaatatgtatccaacttctttccctccttgcctccctcccttcctccctgcctccctctcttcctccttctctctttccctccctccctctgtccttccctccccccctctctctctccctttctctctccttccctctctcccccctctctctctctttctcttgctttcctcagggtttcactctgtctccaagggtggctctagcctcccaagtactaaaattataggcattcttggcctcacccagtcaaattgcattcttaaaaaaaaacaacaacaacctgaattctgggggcaggagtatttggaggggaagggaggaatgtactcattcatgtatgaaattctcaaaaaaaaaaaaaaaacctgttattgtgtctatgatgtgtgtgcttgctatgtgggtgtgtgcatgccacagaacaacttcataaagtaggttctcttccttttttcagacagagttctctgtgtagccttggctgtcagggaactagcttggcagatcagactgtcctcaaaggcacagagatcctcctgggattaaaggtgtgcttcaccaccgctggcttcttccacatctgcaagcattctggagattgaactcaggctaccaggctatgcagcaagcacctttagccactgacggccctccagttcactttcatgggtgtagtgtgattcaacagagagacctccctgtgtgtgtggcagagatgtgtgtgtaggatcagagcatctctgcatacttaggaactgacttccaggggcttgggaggcccaggtgttagaggtcagcctaggcaaattagtaagactccccaggggtgggggtgggggatccttcatctttacagaggagttagctgtcagaacttagaggtgtaagggatgttcttttcatcacctggagattttccaaagggaatgatggttacgcgactttccaagatcctaaatcaacattagtgagtctaagagctagctcatcattgtcacttagattacatgtaggacattcagaaacaaaaagaaaaccccatcagacggcccacagtgaaggccaatgcgggaggcttatcctggccaacagagtgagactgtttctttacaaatacaaaacaacaagcacatttaaaaaacaaaaaactttatttttttaaagccagaatctactttgctttataaagaaatcatctattgaattcttaaatttaaaggaaaagcccataatctccattgaaccagacagacaagctaaaaatataatagaatagacaatttccgacttctaggctgaaaacatacgctgggcagtgggttgaaatgaagatgttttcctctctgcagacactgctgagaccagggggccctgagaaaagagaatgcaaccctgcagaggactggctaaaaaatgctatctgggtgcatcctgtgcctaggagagataaaagattatattttcatttgcatggtttgctggcttttatttggcagatataataacacaggctacgcggagcccataaaacaaagtgagaacagcagctcatttggtggcagaatggaacagttatggctaaagggcttacataattcatttcaaacccttgtgcctgtatttattgttgtttaaatgaaaattaaactctcgaagccataaggagggatctggtcagaaatgtgattgagagactttcttctttcgtagcttctgagattatcggtctgggtctgtggcacttaaaaacggccatgggtctagaaggaacatacttggattaagccctctacttactcattccccccattccgtgttgctagtcaacgctagaacttcgatacaacagaggtcccctccaccagttgtcgtggagttagacttaaagcaattggaaattgtggctgggaagcaatgtttaacacccacacagagtttagcataggataatacttaggggaatggcaggacaatgctaaagaaaggctgaggcaaaagataccggcccaaccatttcatggtagaagagtgttttttaagattattaaaagcattcctattacatcatatctataaaatatttttaaattcatgactttaaatcactttgttttcgtaagagagtaaacattttaacctctattgcgagtgcttaagatcatgaatttgctgttaaggaagaatttggggttttgaagaaatgaactttaaatgtaaaattttaaatgaaagcctccccttacctccctcagttgtaggcattgagcccagggcctcacacatactagaccagagctctggataagatttgaaaatatcagtaatctcaataccaatttaatggaatttcaacagtatggcttacaagaagcatttaaaataacattatagttttacttccttcatatttcatggaggtaatctacaatactaccattcaaagatataatttataataagttaaaaattgcttgccatccagtgtactaaaaagtttaatatttttggactgatataatacctataatcaaagtagtcttgagaatattaattcttcatttttatattttatctatttatttctctttttgagacaagatctcgttaggaggcccttatttgctggaacttgctacgtaggcctggctggtcttgaactctcagaattcccactgcccctccctcccaagcacagagatgagtatatgccacatctggcccaactcttaatttttttttttttttttgagacagggtttctctttgtagccctggctatcctggaactcactttgtagaccaggtttggccttgaattcacagagatctgcctgcttctgcttcatgagtgctgggattaaaggcatgtgcagccttgcctgacttcttaattatttttaaggaccatattctttgtctgtgcaagttgagttggagtcataatagtttaattacttatgaaagtcaaccaaataatatggcctgagttttactcaccatgagccagtgtacaatggctgtttttaaagatagattgttcgactggagagctgctgtattatttttaggtaaatcagtacctatgtgaaagtcattagcttgaatttgccaaatttgaagatttttatgccatgtgggcagttgctatctacattcataaaccaatttagagagaatgataaataaaagagaaagctattttaagccactattaagtgtaaataaataattcattttctaagtaatgagataattgatggatttcattgtccttcagtggtaagaccaagcactgtgtgtgtgtgtgtgtgtgtgtgtgtgtgtgtgtgtgtgtgtgtgtgtgtgtgtgtaactttaattgtatattcctctagtttaataggactcaacaaagagggaaaaaaacaaacacaagaaacattaaaagcaaaaagaatattttgcttttgcatctgaaacaaaaatgttattactgccatacatatatcatagcctcatgcatttactcttcttgggaagctgtttcttcagtaattcatattcatattcaatcagctgaccttgatggcctcccagtggctacaagaaaatctgagaagtagacagataatgtaaccccggttagaggagaatttcagaaagaaaacgtgaaaaggaggaaaagcaggtggagagaaccaagtaagttttcagttacttcgttttcgccaatacacacacatatatacacatgctaccttttaggggacagaaccaaaggccttgtgaatgccacacaagtgttctacctaaaactaagttacagttgcagtccctacaatctttttatttttttaatgaaagataatatgttttaacacattgcttttagaaaatctcccttcgctaaactaaaaacaaggggcccgctatgggcaaacatgagcattcagtacctaccaccttggtgataagctgaaaggcactgtgctagtatttggggtcaccactctgctataaagtgtgctcactttcgaaacaggaagatctttctgaaacaagaggatcttgtgagaaaacggttttattttctttgaaagatgctggagcgggaagaagcatccctttggccagggcttctcatcaatgagaggacatgtttgtttgcccagaatgaatacccagatcctgttctccaaagtggtttgcatgtttcctacctcactgccatgtgcctcagacctcacctctaccccaaatgttttccgtcatgctgttttttacattgcagttctcaaagcatagtattattatttttagggttgcaatctcccatagtccttattttcactcaaaattacaatacaggggactatggccaatgctatgcagatggccaaatagataataaagactcggttcatgaataatgcccactcagaaagaggacaaaagcaacaggaaaaaagagcccaaattggacaaaatgtgcatgctatatttaaaaaaaaccacacaggcgatcattgtcagagagcattaagggtgccctgtagttttaattatatgccagtggcaccaatttgatgtgactgtttgctcctatagtcaataaaaaaagtcataactgccatcaaatttaaatttaatttattttccacacagccctttctgttttccttgtttttttcttttataacattaacacttttttgttaaaaatgtgtgaaagattaatttgtagaatgaggggagctgtgggtacatagcaaaggacagatggagtgggtggggcatgacagtttttgtctgtggcatcattttgttgtcgctattgcaagggaaatgaagctactgctaccacgatcctttcgggtgtgtggggggggggcgggcaggggagctcagagaaggtgtgttactgtcacctcatgctggccactgctgtctaaggccacagactccctagcccctgtgtcaccagcctgttcatgagcattgcttgcccaagagcacttttcattgcatggctgagatttacatagaatcctacccgacttctgtacaaagcagaacgaagagtcgctgtaaggtgaccatgctgaaataaattcatgatctatctcctcccaatgctgaatggaaagccaagtgcacataggtccggtgagggcggggattgttctttaaatgtaaatgttgtgggcagaagtcaaggatcttactcatgttgaagggggtcattattttttagtgtcaaaaatcacaatgtaaaactttcaacttgatttttgccttaaaacagctctaatttatacataagtgttgtgggagttcactacattgtaaagtttcttattgaagaaggcaattaccagggagaaatcactgtcatacggcacacacagacattctgagaaaaagtaaaacttagaggaggaggaagaggggaattcaggacagcgtgtgggaggggagatgggagttctttttatgcacaaagagatccattaacaaaatctttatctgtttccttccccttgtgaactgaaccaacttgcagtgcccagaatatgcgaacgtgattgcaaataaatgactcgggtggcagggaggagatgagggaggacatcccgattgattccgtggcaagataaaatttacacggaagaaaacgtccccaacatctttgcctcgaaggttcccatctgtcttttcgaagcaaggcagggcaaggtggtccaccaacggatgtcggtgtcgttaactgaacaccccagtgccaatactgcactccccaggccacttcagctggtggtttgtgctcgtacagatagggaatttgagattcaggtcattgtgtattctcacgctatttttctaaccagacagtaggctgtactggaaagggctgtctctccaagcagattataggtcaagtggccgtgttctacaactgtgcctggttgacatgattcctctgttcaaatcatgggctataggagagcagtctggggcagaccacctgtgtctaacatcgggctagctgcctcactgcaccccagtggccagcacatccactctgtttctgtttttgtaaaaccagtcataaaaataacagcatgtgccttcagtgggaatttagaccctatctagcagggagttcattggctccagcttactgagagtcagctgagctttggatgtccccaacacctgatcactgagggcactcaagctcccagatctctagtatgaaacagataacctgtgtcactaggaaaaatatggtgctaagaataagatagcaattcatggggctggagagatggctcagcagttaagagcactgactggttgctcttccagaggtcctgagttccattcccagcaaccacatggtggctcacaaccaatctgttatgagatctggtgccctcttctggtgtggatgaaaacaaagcactcatatataaaataaataaatacttttaaacaaagaatagatacaattcaaaaacatctagcagtatgcagacagagtgaaactaatattgtacaaaatggagggggtgagtctgaggtatattttctgcaccagtaaattatagtacacagaaaaatcaataagtacaaatgtccattacctaactaatttaaagagagtcctcttgtgtttgctctcccacactttctccttgattctgtatggtagctggcattacagaaatggaaaatacaacatgtttttgtgcatacgagcacatgcacagacataaacaggctcaaaagagagtcactactcacaaattagtacagcaatctcaacaatagccttgctgatattgagacaattgcagcctgttgttacatgcctagactatgcatgtaattttctctctccatggtgatgaacaaaatgtaaagtggcctcctacctcctgtactatatgaagcatggaagtctgtgctacacactggaggatggttaattcaccgactacagaggggctctgaggggctgagaatcagacagaagtggcaaccatctgcattccgtcttatttcttttgtggtcctgagaatggaagccagatcctcattcacgctaagcccagagctctgccactgagctacactgcaccccgcttattttctaagattacaaacaagaagatgtccatatgtgtatgtatacagatgcatatctaaaatagcccttttacaagctgacttttctgtacaatgatacattttcagtgattaacttgagtacgtttttctggttattgccatctcggcagttctctcttcctcgtcgatgaagcacaagaacacaatgccttcaaatacactgtttcccagattcctttgcagctagatatccctatggcaagccgtgtgtgtgtgtgtgtgtgtgtgtgtgtgtgtgtgtgtgtgtgtgtgtgtatgagtggaagcatttgtgtcctcatttaaaaatagccagtatgcctttctatgtctttaattttatttctatgtaatgtctgaaatatgtgttatagatggagctaggactgatacaatggccccaatgatgagatgtttgtatctgtaatggtttatattgactgtaactagatgggatatactcacctaggagaaagcttctgggcagcctgtgagggattatctagattagattaactgaggtgcaaagaaccagctattgtagatggcaaccttgcatgggctgaggtcctgatggaataaaaagaagacattaagctgaaattaaggactcatctctctgcatggatgcaatgcaaccagctgcctcaaactcctgctgtcacgactcctctaccatggtggattacaaacagaggactggaataagcccttcctttcttaattaccttcggaaaaactggtcatctcctttgaaacaaggcccctcactggactgaagctctcaccaattaggctagactagccgggcagcaagccccagggatcttcctctgttgcctcccccgtgtggagattacaagcacatgccatcatggccagacttttacaagggttctgaggctcaaactcaagtcctcatgatggtgcagcaagccctttatcatctgagctgtctccccagcacccagtgctattatactcttgagacttgctaagagagagagtatagatcttaagtgctctcaacacacacacacacacacacacacacacacacacacacttatatatacacgcatacacatcatatacacacacctactcacacatataggcacacttatacacacatacacgtacccttttatacacacatatgtacatacacacacacatatatacctgtaactgcaagaggagatggacatgttaattagcctgactatggtaatcatttcactatagaacatatataaacttcacattatactccttaaatgtatacaatgcttacttcaaaattaagtaacaaagttaaataaaagcaattatgtcaacttagctctaggtgaatagagcatggctacatttgttttgcttgtacttttatgtactttaaaataaaaataaaagctgttgatctgaaaaagaaatcatgtgtatctggctgaaggtcttgttatttgacatttcttcacttgcagcccaaagtatttctagctgagtcttcatatataacttctacaacacaagggatggcagggtgtttatcaccacaaatttgccactttaagtgacatgcctttaaatacatcagcataacaaaagggacatttatagagaaaaatctaataatcttttgaaaatatgtatgcgaaaaaacaacagcagcagcagcagcaaaaacctggtatggggtaacgctcttgttcactgtaaagatttgtcacaagtattagtttaataaaatgctaattgtggggctaccagactagaattctgggaaggggaaaggcaaagagtgagtcacagccagatgcagaggaagcaagatgagaatgccttactgagaaaagatgccaagccatgtggctagacatagataagaattatgggttaatttaaattgtaagagttgttagtaataagcctgagcaataggccaaacagtttacaattaatataagccttggtgtgtttatttgggactgaagggctttcagacagggtgagacaaaaacttctgtccacaaaaaccagctagggtaagtgtgctagtgaactttccattgccgtgaccaaacacccagcataaccaacttaaaaagagcaaaggtttgctctagtttcagaacaagcttgacctcttaccttttgggaaaggcagcacagcatgatagggattgagagcatagtgggaggctgctcaactctgcgcatccgaaagcaaacagagaggggaaggggctggaatccagatatcccttcaatgcgcatcccccagtgacctgccgcttcccaccagccacacatctcagaggcactatcagcgctctatcagctgggtgccttcagctgggtggcctagtcttcaacacgtggacctctggggaacattttttttgttgttttgtttttcgagaaagggtttctctgtggctttggaggctgtcctggaactagctcttgtagaccaggctggtctcgaactcacagagatccacctgcctctgcctcccgagtgctgggattaaaggcgtgtgccaccaccgcccggcttctggggaacatttaagattcaaactgcaacagtgcgcaagggtaattgttgaaagatccaccccctaacctcagtgctgtaatagtttctgaagtagctgtctgctacgggagcctctgttccaggcaggtatttggggactaagactttctatcttgacattcaggtaattgtccacatatggcccccgcaagacctcacaaaataaaatgaaaacgtgtagaggatcatacacaagaggcttgaattgggcgaggcctagaatggcatcttacactcctgccaaccttccacgggacagaactcagtcacggcccaaaactcactgagaaacatagttgcaatgtgttcccagaagaaagggaggaaagggaacataaactgtgactgtcttagcaaagacgtggggagtagtttgcagtagctgttttaaactctccctccctccctctcccctttctccccccttccacctgtgacttagtgagcctacaggatccacctgctgctgccccttccctgcagtgctggcgttacaggtccaagccagcacacttggcttttcacaaggggacctgcactcaggtccccacgcttattcagcaagcactttacccacggaaccatctccccagtccatctagcttcgtttccaaaggaccatgtgctcaaagacacagagcattgtatggtgacaaggtattcttgcaggtcatcttgacactgaaatatctcagactcaaacatttctcccctttgaagtaaaagcttactatttctcaaaatgagctgcacagatgggtgtggcatcagccatgtgactgagcaatgctctttccctccctggtgctgctccgtctccttgttcatgtgcttttcccatgatgagggaggatttttgttttaacttctacccacagaagtttagactttaagtaagtaagcttccacggggctttgtgttgttaaaaatacatctaagtagaggttgttggagatagcaattccccaccgaggcagataggatgctttttatcagtgttcagtgctatacgggctgttgtgactaagtgatttctgatggcaatacagaataggatcagttaggctattttactagtgtcaaaaattgaaggaatggagggatggagaaaaggaagaaagagggagagaggagggagggaggggaagaggcaggcagggaggaaacaggcaggcagatgggtgggtggatggttggacaaatagttggagtgatccacctctacattccttgaaaaatgattcatgttttgttgaatcactgtttccatccagtgtatgacaattatcagagagtccatttgagaatatatgattgaaacaaaaaaataaattgcagatataacaccaagcaaattcaagaggaatggaacccagattccatttcaacttactgagtctgtggcatccatcatcaaaactgttacattcggtcatcttctatcaataggagtgctgcagtttggatacagagtgttcccccagaaggttgcatgttgcagccctgatccctagctgatggtgctgccaggagtggtaaaatctccaagaggagagtctagttggaggaagcaggctttccagggtacaggaatcccaacctctctctgctttctgcttccgggctgctgtaggcgagcagtttcctcgccgtttcctccctgttgtggtatgttatctcagccaaaagctggaaccaaatgatcatgaactgaaaccatgaaccaaaacaaatccttccttttaaagttgattatctcaggtattttttttttcacagcaacagaaagctgacaaggctcttgaactttaataataaaaattgatccctattttcagaactatccagaagattttatttctcttagcagtgtgactttttgaagcttaacttctctccagagggttgaggtttatgaaataatggtatctgattggtttgttggttgcctaaacaagttttaaagctagttttaatactttgccccctgcctttggaaatacaaaatgaatttaaagtatttgtgttaactagagaaatctgaggtattactgtttatataaagcacaagatacactgtacaaaaatacttccacaaaaccagaaagagttccaggctaaaaatcaaaacactttcaatatattgtgtatatttcaagggagcccatttttggattatggggaccacctgtataacaaggctggcatacaatgaagactcaatcacttttggatgctgagtacgactgactaggaccccggaagaagggaagagcaggaggagaatcttgggtggtgtttgttctcagttaatggtaagaggatgttttccttgcttggtcttgtaggcacaagaataagtctacctggtcaaagggatgtcctgaatctctaagaggatggagagaatgcttctgacacaatatggtgtgactattccactcctcattctacaaggaaaccacacagtatcttgccagcttcatggtggaggatgtggaggccggtgggaaggagaagggggaggaggagaagggaaggaggaggaagatatggggatgaggaggaggaccacagctccgatctatgggaaaaccacagggaattgtccaatctcctcctcctgtggtgtggtgcggtgtggaaccagaactagcccattcactccttcaatgatatcttcaggcttggagatatggcaatggacctatgtcacttagctcacagcctagaatgtttagcagaaccatctggggactgtctacctcacatcagacttaagtgaatccaaattacctgaactcagggaaaggattgagccagggtctaagggtgtgtgccttcaaatgcctctctattgagtctgttacttgctaacaatcaagagtcgaatgctttgccctggcagttgaacaaaatgcgttgtagttgcactgaatgctgctatcaaagtccttagtcactacctcaatatgctatgatttggagcttaaatgtcccataaagaccattgttagatgatgacggaacccttaggagatgggggcctagtgagagaaagtgtagtcactagaggcatgcccttgcaaaggattctgggatccaaacaggttcccttcttgactttacgtctttcccaccaaacacccttgccatgctgtactgtgcagtctcaggtccaaagcaacagggccaagaggccacaggctgaaacctttgaaataattttgggtgccaaaataagccttttgtccttttaatttgctgacctcaagtattttgttacagaattaaaaaactgactaatagaatatgaaaggactcagacaatgttctcatttgccagtggctgagagatgtcaagtaaaaactacttaccgaagtctgtccccaccaagcaataggagggacagtcctggtgtctttaaaatgtgccatcatatttaacaacacaaccaattcctaagcatttggcctgagtttccgtgaacatatgagcactcaggaaaagaaagattgaataattgctggtagacgattaacaatcagaaaatggtacccaacatcaggagtattgcataccaccatgaaaaggattaatgcatttcctagtaaataagtgactagagtatggtgaaataggattatttttttcttttcacttaggaaactcaaaaagtagatcatattcaggtaggaacaacctggtctaaaactgaagatgtttgtaaagaagagagtgtcaaatcaaatactggattgcagttctgaggctattagacaattcgaaatgggattgtcatgttttaacttctttcttacaactagtgctctgaagtctgcagatgggggtgcttcttgggattaatgttctatggtgtttttatttggcctgctgtctttctacaataacgatttccatctactgagtcttacagtataaatcagtcaaaccagaatgaacagagattttctgtccagtttgctttatcttaatagccagagtggagcatatttttttcccttcaggagtttataaatagcctatataaaaccaatcactacgttttcatacacactcagcccattagtgaaaaattatactccctcgcacctccaggccttgccacagctaaatgtaagtttttgcacttcaatattcatggcagggaaaaatcatcaaatactaatgttcaaaccccaagggggcagcctgcacacagatgaaaatatgactgagcatgcaccaagtttttgttagtttttgttgtatggcaccaggcccagaggagaaaaccaaagccaaaagatttaccctgagaagaaaaagaaatgagtcctcctcacattccaattaggaggtaactaatggctgaagagtctacagaaatgccgacattgtctcaggcctcagccgaggattaacagcacagcaaacacacacacttttagcttgatccccatttctttagtaatacatatcaccccctttgctgtctgatgtcccactagcaggcaaaacaagttatttttaggagtctggtcaaacagcatttactcattcatgacagtctgttctaagaagcccaaggccagaaacaccaagaaaggccaatgtcaggactatggttgcagaaccaagacaccttgcaagggaagcaccatcactagagacctagaagagggatgatgtgtaggtaccaccggcctgataggattagggaagaaatcagcagaagcatgcaaatcgatgcatccagatggtggccagaggattttacattcatagggctgtttatccattggtttggctgaaggttagatcagggaatgtaacaggtagtactcatatctgaagacagtttttcttaggaaagagatgcaggtagggagacagccacaattctgttgaagacagaatggctccttccttattccaaactgctcacagagagccgtgagactgcagctccctgttctcatcaaagtgaactgctgcaagtcagcagtgattgggggctgcagaatgcctttttggtatggtatgctgggagaagtgagccacgagaacagcctgggaacctgcagcgaggccctgttgcaccctgccctgttctgggctgtgctgggtaccatgctcaccaggacatatactacgctgtcccaaagagcttacattccggtcatttgtaaacaataaaaataccaacaaatgttgcagttggagtttaatcccttgggttttctggaagagaaagtataggaacctattcactatgggatcagtagtcctcactatagggtgacagtgttgctccctgcattttgtccttgggggagtcatgtgagtctcacaggttgagaggaatgtaaggcagcttggcaccttcagctgtctcctccatcaccaaggtagttaaaggcaagaccagctttgctggtggagttacagtaggaaaacagacagctagaagaggggcccaagttacttcagacctcccaaaaaaatgagaaccaggccattgtggtgtgaaatcacagagatttggtaccctctttaaaccacaatataacatagcctgtgctgtttgatgccattaatgaatatctgtttcacttgggacttttagaggaggccaaaatcacaaactgcagagatgatcctcgcccaggcagacagaaggggatcaacgtcttaccattgtgtctttccccctcagtctgggtaggtgtcacactggctttcccaagatgttgggtaccataggctctgctgccttcagtccttgttcttacaacaccctctatctggaaggatgctcagcatttcccaggttagtgcagacagcagtgggatcttctaagcaaacttttgatactaagaagggaaatcaaaaatacaagtatatagggaggggctagaaagatggctccatagttaagagcaagtatttctttcccagaggatctgaggggtctcccagcacccatagcgggtagatcactaccacctttgacttagcctcagggggggtggtagtctgtctcctctggcctccacagttttgactcttgcatcctgaatccatccctttgaagtctacctggaaccagaatgggggagattcgaagcagctcatgtcttgaccagatgctggttttgtttatccacccaaaacggtgccgtgcaagctccttcttttctgtggagtgatcattctccccgtgaacaatataactcttcaagagcaatattctcattagcaattaatttgtgattttagagtgtgttgtgtgttccttgtgagctgcaggcgcatgaacaatgccactcatctccatattttaagtctattcatgcacaggaaaagagtgaggaagtgctttataatggaaattattcctaaattctagacattcagtttaccctgataaacattacttaatttcaaattctcctattaaaatatggaattgttggagcaacaagctgcctacgtaattgtcaattccttgaagtgaaaactccactgaatctgcattgagcaaggggaaagtgaccacagacaggaagttgatgcttccagggcatggtttagccatctggaagaagtcggctccatttcatctattttatttcatttgtttttcttttttaaactgaagtgattttctttctcagtgtgtgtgtgtgtgtgtgtgtgtgtgtgtgtgtgtgtgtgtgtgtgttgacctctagcctctgtttcttcctctataattctccatcttgtttttgagacaggtctccattaaacccagaactcaaggattggctaggttgtctggctagtgagctccaggaatttccctgttcccctcagcactggggttacaaacctgtgtgctgtttccacctgccagctattccatggatagtgaggatctgaactcaggttcccacgcttgagtcttctccccagatctacagagtttttcatgtgtgtgctgtttttagctgccacaaatccacattttaacatggaagcatagtgcaaagggtaggccgtagactcagaaattagaatactgggtttgtcgggggaagaatagaggcgagcagtatgagagataccataacagaggaagccattataggttcaaggaaagatctgacacttgggagatttccagagatctacaaggatgacaccaactgacaatctaggcaatggtggagaggctaccctaaatgcccttcccctataatgagactgatgactactttatatgccatcctagagcccttatccagcggctgatggaagcagatgcagacacccgcagctaaacactgaactgaactctggaacccaattgcagagagggaggagtgaagagcaaagaggttgcaaccaggctggtgaaacccacagaaagagctgacctgaacaaaggggagtgcatggactccagactgatgtctgggaggtcagcatgggactgatcaggacccctgaacgtggatgtcaatgaggaggcctcggcactctccctggtagaggaccagtatttacccctggcgtatgaagggactttgagagcccattccacagggagggatgctctctcagcctggacacatgggggagggcctaggccctgcccaggatgatatgactgactttggggaacccccatggagggccttacctgaaagacccctgccccttagccctttctttctcaagtttgtctcctcttcctcctgtcggcagcttccccgatccccacccccggcagcttccactttccccgccacgcccagcccgagaatgagcaccaggtgggctggcccgagaacgagcaccaggtgggccggcacgagggcgagcaccaggtgggccggcacgagaacaaacaccaagtgagccggcctggagccctgcccctgagcccccgcccgatgagaaacactccgtcccaaggtctccgcccccaaggtcagccatctggacacggagggagggggaattgagtctgttgtaccagacaccagaccttgagaatatgctgatctggaatggctctgtgtctcatttgaaccatccaatggaaatgattctgtatttcgcctcatttgaaagactctgtttcacctcatttgaataactctgtactttgcctcatttgaataaccctgtatagcgcctcatatacattgaccaatgggaatagctctgtacaatgcctcattagaattatccaatagaatccctgctcctagcttgtgcctttttccctatataaggacccctttcccttggctccgggcgcttggcctcagaaaagctaagtcgtccgggtacccgtctcctaaataaagcctcttgcggttttgcatccaagatcgtggtctcgttggttcctgagtacgggggtctcctcctacgaaagtacctctttgggggtctttcatatcctccctgggaaacagagggaggatgaggtgaggggctggggctggggggaggggaagctcaggcgtcccagctcgcacggggcacacatctgcaggcacacctctggcagtcatgagagggcctgccgtcagtggggaatgtgaccattgtcttcctcggtgaacttcatttagtgacactgcattgttcccgtcaggaggcatctcaactgttcagaggaagggcaagcgatgaaattgactggacactgtttccactattataacttactcaacacctgtcttctttggggtgattcggggccaccatcttcactgataaaactgtgctatggatggatatgagtgggaggctcacttcagagagaagcctggatcacagtgctattgtagtaagaggcagaaaaggaaattaaacccttaacccatttgtgtttttgtttcaaaccaatcataattaggaggcaaaatagaagattaatttatcagctcttttttgagatgtcatttttagtcatcaagccatatgcccgtcacgcctctaggataatagctgggttcaagaaccgggacaagaataaattgctgaaatcctagagaaaaacagcttttcttctccataaagccaacctttgtcatttgaatgataaaaacagcagcgtttgtgggtacagattttatttaattaacaatatatgggatatacatttaaattgaatttctgatcattttttgtacacatatattcaactatttcccaacacacttgaaatgctagggaaatacataaaacaattattaaatgttcttttgctatgttaaattcagattctaaatgggtttctgacattttatctggcatcttaaatcacatggtatttttacttatggatcctagtccatattttttctaaagtagcattaatagaagaggaaaataagcatgtgtattgcccggttttgtgtgtcaacttgacacaagctagagtcatcagaggaaggagcctcagttgaggaaatgcctccgtgagatccagctgtaaggaattttctcattagtgatcagtgggggagggcctatcccaaggagggtggtgccatctctgggctgttggtcctgggttctataagaaggtaggttgagaaagccatggaaagtaagccagtaagcagctcccctccatggcctctgcttcagctcctgcctccaggtttctgccctgtttgagttcctgtcctaacttccttcaatgatgaacagcaatgctgaagtgtaagccagataaactctttcctccccaacttgttttttggtcatcgaagcaatacaaaccctaactaaggcagcatgtaatacagctgttgtaattttaaaaagcagcatgccagagacagacaccatgtgacagagcttgagtggaagggctttcttaattgggggaaagtgaatgggaaaaggagagaggggagagaggggataggagcagcagaagagaagagagaagcagagagagagaagaggtgggcagggcccttttaaaaggcaatgtagtgaatgtgcacaggtggtgctcttagtggctacagatgaggatgtgccctgtcagaaccccaagggcaggacagttacagatgcctgaatgctaacaacagacttcttgcgttatcatctcagggttgtagtttgggacttagagaatggagctcaggaaaacctggcctgggtataatggcaaatatgcagcaaggcaaaattcagcccaggtcccaggaagttcaaaggcagttctacctccctgtcctgtttacggggtctcagacatcctgtcactaatacaggcaatcattgttttttaaaaaaatatgataaaatacatataatattaaatttacgatattaactactcactctgtatctcttcagcccttggcaactgtcactttatttactgtctataaatttggccacttactacttcatacagatggcatcatacagtgtttgtctttctgtatctggcttatttcacttaacttagtgtcttgaggttcaggtctcatctacattgtgccatgagctgaatctcctttcttttcaaggccaaattgtataatagaatatatataattatttgcacttttgtgttttcatttacccatcaatggacacttggattacattcaacttttgtctactatgaataatgttgcttaaacaaatatttgttcaagatcccattttcaattttttggtgtttatacctaaaagtataattgctcaatcatacagtaattacagttttcaaaaatttgcagttctagggcttcaaagaagaaccttaagcatgctaggcaaacatgctacacctgagctgcttccgtaattatagaccttattttaagtttttttttgaaagactaccacactggttttcagcatgaatgcagcactttatttttctaccaatattatgtttcctttccaacatttgtactttctatttttctgaagtatcctccctaatggatgtgaaggaacattgtttataacatccatgacaaaatcaaattaaacattatacttattctaaaaaaattgactattttggagtctgaagagataattttgtgcatctgtgtataactttttttctttttttctgaggtgtgtgtgtgtgtgtgtgtgtgtgtgtgtgtgtgtgtgtgttgtgtgtgtgtgatctgtatatgcccagagatgccagaagagggcattggagcccctggactggagttacaggtgtttgtgagctgccagatgtaggttctaagaacagaaccaagtcttctgaaagactagcaggctcttttaactgatgagctatctttccagcccctgagtctatatattcaaaatcattttcaaattgataactatatagttgttttagccatttagaaaaaaatgacaagaaaaaaattatacagactccagtttttaaaagtgctttccatttttggttggcttaatctttgcatatgggacccacaaagggccaacacaatttcaattttttaattaccaaatacaattcctttatattggtacactgcagtttatctattcagacacgatggacatttggatttcgtccatctttgtctgttataaatgttcatgtgtgatgttttatgtggccatgtgtttccatgtctcttggaatactttcttagtctcccaggctgctgtgacaaaaccccataaactgggtggctgtggacaagtgaaatttatttccccaagtcctagaggctagggagcccaagattattggctatctgatggagactcattcttcacagagctctgtgaagcctcatttgtaagagcatcaaccacatccacaatggtggcactctcatgaccaatagcctcctaaaggcaccacctccaagtcacattgagctttgaccagtttaatatataaatggtcagtgtgaggcacacacctaggactggaataagtagatcacaggatgactcagagcagccaggctgctttccaatgcctctgaaccatagtttattctacccagaaacacatgaatgaaatgcaaggttctttagtgtggctcagaagacacaacctgatccgtaaccaccattccagttttctccccttggagataacactctgaccattatcaataccccccagccccccactcccgccatatcatactgtagagagttgagcaagtactgagtgggaagtttcatctttactggccagctcccccccacccccacccacaccttggaatgtgctaaatacactactggaggagaaaagtaaccatcaggtttccagcctgtggactgcactaatgattgtcctagctacatgtgtccactggtacactagtggtacagtgttatgggagcaatcaaccacttcctgattggatacaaggccccctccacaggaggaaatgctcatccagtactataaatctggtcaggaacccatggttggaaaatctcacaggccccaaggatgactcttttactattattttgctagatggacatggaatcaaactgccccctaaattcatactctgactcaccagagaagtttctttgtgcaatggacagcagtaaatgcagaaactcacaactgatcaaagtgcagggagtaagtttctgtggagtgctcagccagccacatacagccgtcgagatcacccggtccccaagtttcaccattatagaggagggagtagaaatgtaaaagccagagatcaggaaaggctggcttgaaacaatggctgattctggacacaacaggactgctgcgttcatgagttcacagcagctaaggttgcctgcatggttctagagaagatcaagctggccagcattccagcatggagctcggagggtttcatgagccttcacccttaactgatgagctattgaaaatgaatagatttttggttggctgtgatggcacataccggtaatcccagcactcctgaggcagaggcaggtggatatctgtgagttcgaggccagcctggtcttcaaagagagttccaggacaggctccaaaccttcaaagaaaccttgtctcgtaaaacaaaaacaaaaacaaaaaacaaaacaaacaaaaaaaaaagaaagaaaaaagttctctctctctctctctctctctctctctctctctctctcacacacacacacacacacacacacacacacacacacacacacacacgagaaataaaataaaataaataatttcagcaaacactgctttcctccacaggtgcaatatagtttacctttaaactgcaaagccccagtgctaaattattttctcctccaaggaggatataatctcatacttaaccaacacagcgttttcaggcttacaattaagtctgcagaagcacttattatcacccttatggttacagtctcccccacctagcaaaaacccaaggatgaaatgcaaagccccacctagaaagaagggatgctggctgctagagtgagccccacatatccttgccacgcagggcgttaatgagtgggcggcacgcacgcagaagggcatttctatgtatcttggacttggacatttgaatttgattacattcagagttcagttttgcctcgtaatctctgttggcgttcacactgaacttggcttttcctggctggctccatcaaacagtagaagtaaccatttgaaaagtccagcaacaagagtggggttttagaactgcagcagccaagctgattcccagggttggcctccttcccagggagggagatgctgtggattgtgtgagcagaatggagagcctggtatggaatgtctaccagagagtggtgacttctgggtgtctagagagagccttgaattaagttggtacattcaaagttgccatagaaaccctgttggaatgccctaactttctgcggagtggatttcatgtttaaatgttagtcttttacatttaatggtatatggaatagaagattaacatgaaagaaagaaaacacaccccgaggtctgagtcatctaagatacggaatgatcttccgatattaagtcactctgtccagtggatgcacgaagaggtgggctgctgccactgggagctgtccaggagactctgcatgcctttgcgtcaaagctgcactctgaaaggccccgctgtaattcagcaaacccagcttgcacttgaagccaaatgaaatgcaaagatccttttagcagcaaacctcacggagaggaaaatgccagttagcaattgtgggaagttccagctactgtattttccccccaccgcagattgaattccccctcaacatccgtgagaaaaacatcgggaggctcttttaaaaatggttacattatcaattaatctatagtatgtttcaaataaatatttccagtaaatggaacaaaacccaacatttatatggcttgcacctaaattatcatcatctcggagcagatgcagaatccaagacaaggcgaacaatccacactgtaatttgcccagtaacattgtcttagatctaattagtgcttatgcagatcctttacaaaaatgtgaaaacggcaccaggatgtaattgtttaatgaatttagtgcaaagcacatctgcataaattccattttagctgaaaaaactaagttcaaccgctatttgctctagagccaaaacattgtgaattgtgcccactgtgctgttgccttgctctgctggcttggagatttcaaataaatactagagttaaagcctccagctgcaaaccagcccatctgtagatgttcgttatatttggcagtattctagaatgattgtgccttactgctcagaaaaggggcaggaggtaacccaaagttttgtcaagaaaaaaaatggggagatttgaaatattcactacccagaaaaagtaaaaattttgagactgaatcttacctaattagtaaattttaagcatctatttttattgagccttgtatgaaaattggaatgatgctccgtccaacagctagttttggtgaaaaatcacagaaagttgaatttggacatgagattactgaaattggagttcaaacctgcccgtctgagattttacttgacccatgatcagggtttcatatgaaattcattaacttctataaaaaagagatgaatcagtcactcacatttatgctgtggttagctggggatatctctggggttgtttttgttttgcttctgtcttctttttgttgttgtttttagatccttttttttttttttttttttttttttgatgcagcggaaatgaactgttagaccaaaatggtttttttctcttcactggctttgctacagatggagtgggtgggggaggggtttgtgtatatgcgattcagagatgttggagcctgagtcagcagaattgtataaaaacgataaactgaatttgtctttattcctggcagtgatccagtttaggtttattcagcctggaagcagcatgtcccggtgtcctgactgaaccaagtgctgttgctcggtctttattgggtttctatggtagaccaagtttcaggcaaaggttccctggaaacactctgaggcagagagatgtctgcagcacacttaccgtgaagtgcttggagtggtggaacctaggactgtacagaaaaaatgtttctcagagcagccacggaagccttagtgaccatgggtaccaagaactggaggtgtcacttcacactgggactgaattgaaacaaaagggctgaaccctaactcctcctgttcccccgtcaatcacatgtcgtatgtacaagggagaggcataggcttgtctgggctctttgggggagcaggcacagttccctgtggctaagggacatttgtgagctgactgccacccacatcctagaggctgggttctgagtgaggaccttggcagtgaattatcactcctgctgcactcacaaatttcagtccatttattttatacaataattttgctgacatagcttacctgctagggtaagctaaccttgtccttcagccccccgtcatctgtgcttcccaggctgtgcgagctgtacttgtctattatcaagatttgccaggggaacaccaacagaccctcacacaggtcaccaggacagtaggcacacaggcctttgccccactatgtaacaacagttctacctcctcctgatgatcagaaccaattactcctgttgagatggtccctcttttccttgtaaagggtaccgaaaggactgttagcacctaggtcttgagatctaaggtgactcttgctctgccccctggtggaaacattttcactggagccaaacttctactcttgcaaaggggattagtagtggatgggaagtacaaattccccaggcaggtcctcaagagtaggggtgggatgatgcctccctcctgttctggtttccaggccctcatattccacatgttgaggacatagtgtcatgaaatggttgctgatttaaggtcctaaaggttggtgtcccacactggcagcttatcatcaccaagatgatttgtgaactcctccttgacgagcctgcccaatttcacatcagatgctgtagtctatgaaaggtttgttactgatcgtggtcaaatgcttcccgtcatatctctgttgctatgaagtaaggagattgcttatttctgtgttctgtgtggccccatgccagtgccacaaatacccagtggggctccaaacagtagtttagagcctatatgaagaaaagcaaaacctgcatctggaataagcatcaattccaatcaagacaaatcatttctctttctgaggtagaaacatgcaatgtgaccaactcctattaaatggttgctttttgttgttgttgtttgtttttctgaaagatgatgctccatatgaaaattagtgtttgtttctggcttgcagttaagacattatcaggggtaatgaccaagtcagcctcgatgagcatgagtccatgagtttgaacaccgacagagtctccaatcttatagacgtgcctgccatgtgtcatcacttatgtggctgatgacacaagttagctaatactgcccagtgaatgaatcatcttgtctgtttggttggttttctgttctgcagtagatactctactctactagagagagctcagtggagtacttgcctagcatgcacaaagccctgagtttattccagaactggtttcaaactcatgacatcctcctgcctcagcctctcaaattctgaaattacaggaaaagatgcctggcaaatgttcctgatatttatagtcttgctccttccaggcccctagcctaggcttttgcaactgcccatgaatccccacatgggacacttttccttttctcaaaagcgtacagtccagtgcgtagtctaaagtgcttcctactggaagaacttccctttgcctgtctttaaagtcactcccaggagggattactatgcagtcagtgtgtatctcatgcttgcactcacaaactcttgcgtaaaccaagcctagtcttttttcctatccccaattgtccaataagggatggtgtgatccatgttattctgcaagcaaccgtcatatgtgtgaactgaggaagagaagctggtgtgaagatgatgggtaacgtgtggacctgaaactttctcgtgcctacttgccctgcttttgtccagtagggatgtaccatttctgtctagtgatggatgctcccaggcccacctgaccttttgagttgatgggttggatagaacccagattatcatggagagtttggccacatggtcacttgatattccctgttaagcacttcatctcaactggggcccactggcatgccaagagctgttctttcgaatggtatataattctctactgcagatggcatggccttgctccagaaccccagaggtcttcactgtgagtctcttattgccataaactccacatggcatcttttcccaccacagataccttgaatcacagagtctgcttgtcatggggtccaaccaaggtctctgataacataccacatctcgttaatctgaacctgttaacatgatgcagcagttagtaaatcagtgtgttttccttaaacaaacagactagtcctcttggattgaagaactacagacagcagaagaattagcacagggcttgggtaagaggtaaatgtacagtagcatccacttcgtgcaatgcagactgctgaactcactcctggaaataatggaaaaggccaacttctctggacccaagctcattttttccgtgctctgcacactacatctgtagtaacagcagtcattagaacaagtatttgcccaagtttggtttatagtactgaacatccttcagagtccatctggcttctgtggggccaaaactgatgaatcataccagggctatgattggcatgactctgcctgcataccttaactctttccacatgggattaatcagcactgtctttggaatacattgctgctttcattgtcattcagtctttgggacaggggaaagagttccttcaaagtcttctcattgaactccctctacaaactcacaaaccaaaaatcgtcaatgggttctgccaacagccaaccatgttcattccagggcaagtgcccctttctgggttcaaggtccagtgggcctgttataaatcattcaggcctgggtttctacttaattcctggctcccgtaggccctgttccaacaagagaaatatgaaggcttttcagatcctgggttaaattaagagaaaaactcagaacctacatccaacagtcccagaaccctgtgggtatgctctcatccctctgtgtgatgacctgagttatgatagaagtcccttggggaaatactacttaggccattgtcatatgtgtttgctgtggtgattcatggccttccctcctaagggctcaagttcttttttgattagtaaatgtcaagtatgaaaactggttccagtatagacattggataagggcttatgatattattggacagctgcctgtggtctggtatctatctattatggtttttaaaaagatttattctttaattccagcacttgagaggcagaggcaggtagatctctctgagttcaaggccaacctggtctacaagacagccaggatgacagaaacaacacagagaaatctggtgtctaaatcaaaaacaaataaaagaatatttatttattatacatattacatatttatttttgcgctctccctctctctctctctctctctctctctctctctctctctctctgtgtgtgtgtgtgtgtgtgtgtgtgtgcatgaatacatgaatacaggttgttgataagccagagggagtaggtcctcctggagttacaagtagttgagctgcttgattgtgggtgccgagagctaaacttggcctctctgcaagagcagctgtcagtcttaaccaccgagccacctcttcagcctaatttcttttgctgtattcatagagagaaatacgctagttaggttcatcttttctgctcctaggagtaccaagcactggtcaccatttgtacccaccttgattgtgaccggctaaacccaacatttaacctctattacttggggtcttgccctgtttactgttgtcagggagtgggattctgtatcatcatgttcgccatcagtaggtcccacaagggacagccaatcccaagttactggatattgaggccttttccatcagtgttttccctgctgcattgggggcactgtcttcacatgcctggagtattagatccctttttattcagtgatgtagatctagatggccatgggatttctttttgaccttttgtcattttccaaggcttcccatgtcagcaggtgggttttcctaagatagctaatcacacccactcacttgtctgagccttttgagctcttgctccatcagtttacacaggaatcatttaatggttctgttttgcttggtgtagaacctacactctccatgtttctgggagcaaatctgataatacatccccaaggcataatctcccagagtcctggcagggtacatagctctgtatcaatgagaagagaaccatattgacaagttttcctctcaaacgtcatcattctattctccctaatcaagtgctctcagggtcctgctccatatatacttcttcagccaggtccacagctttgtcagcatgtagctcccttcctcacttgccaaggcagacacgtctttaaccacataatgttctgacttgatactggtcattttaggataagaattggacctgggataggttctgaggtgggaaagggccacctgtcactttgaaaggcagagatctgctcatcgtccccatggatttagaggcacttttgatggctcaggaatccaaaaaattttagatttcagagttctggaatgtctaacccaggtgttctcatcccatgtctgaagttgtatgttactgtactttagaaggtttgtcagtctcttcaaggtgggcagaagagcgcagttggttcagaggccatcatatgagacttagggaaaaccctggttctaatgggctcttgagatggtcttgtcagcaatgggccctagaataggtagatcacagattctggccagtggtctccaaggagagctcctggagacttaggtgcaggcctcctttaggaaaatgtcttgtcttcatgggtcatacatactgtggccattgtctcccaactaagacacaacagactagggggaacctccatcagggagctgagtctctggaatcgatgatctccaaaaacagctggctcctgtcccatctgctctctctcttgaggagatgatagccttttaaaaatacattttaaggtaaagttgtatccacattgagactatagagttcctacacatctcactcagctttccttattagagccttctgttaatgtgttacatttgttacaattcataagatgacaataatatattcttaccagctctatagtttatccagatgtctttagattcacctagtgtcctttttctgttctaggatgcaatcctgcacactatattacatttagtactcaagtccccctgagcttctctgagatatgacacattctcagatttcccttgttttgaatgtttttttgacaattttgatggttagtagaaggaatatgaaatattaatctaattaatctttattaacaaaaaattggaagtcagatctggtaagaactgaaagatcagagaaccagggagaagccaccagttgcttcttacctctacccttcatctttccaaaggggcggagatcttctctcagccctccttactacttcctttctcctttctgtctacagtcctccaaacctctatggttaattttggtcagctagtgattgactgtgccctctgactccaagcaagctttatttgtcagaacaccatcaaaatatcacacaacagaattgtgtaggatatctttcccctggggttagactgagttttcttagtatactgaggctataaggcttgtcacagggcaaagtgtcatctcatcatattatattaagttactgtgtctgtcagctttctattactgtagcaaatgccgagataaaccaatatattaagtgtaaatttttattttgactcgtggttttggaggtttcagtctataatcgatgttgtgagataatctttttgaacactgtaatgatatgtctctgccaaggtaccttctgattggtttaatagccaggcaggagagaataggcagaacttcctgtaagaggtaggaactgggggaaggagagaggtgggcccacatttgccagtgagacatggagcaagtcagatgaacagtatggaagagaggcaatgagccacgtggtggcagaatgtagattaaaataaatgtattaatttaagttttaagagctagttgggaataagcctaagctaaggccaagcttcatactaagaagtctctgtgtcatcatttgggagttgatagtccaaagtaagtttgactacaattggtgctcaatgagaagcatcaaatgatgtatttatataagttgttctagtaccaataaagactcaggagttaaatatcagagtgaaaacctggtaggtcaaagcagcagcaaaggaatgaccagttgacttctctccatacttcccagactgaagagtgtgcaaactctctaagtcccactctactccttcctgtgagtcttttctatctgtatttctggcttctctatggctaattctaatcagccagtcactggctccatcccctgattcagggctaacttcattaacacagtctcagagtgtcacagtgtaatcaaatattccacatcaatcaattggccctgtcaatttgggacccatcacaaatcagcatatgatggtcaaaaaccaaaaagaataagaatgcagagtcccacactagcctttgcaaaagtaatcccgataacctaaagagctcccactaggccccaccatttcccagtggttcctcaactggtcatcaagcttctaacatgtgggcatttaggggacacacaagagtcagaccatagctggtctgcacttacagcatgattttttcactgttggtactggctttgaccaccagagtacaggcccatctggcatggttttcactgtgaattcactctctatataaatggtcattactatgtgcaacccacacgtgaagagcactgagatgtgtgtctcacctccctgaaggtgaccattgacacaaagtgtcaggaactcttctgcaaaggagaattatctttcctcctcattcatttattcaatcatctatttgtatcattatgaattcttgaatatttgttttatgctgtagctgggctttctttggaccaccagctccggaataatgacacagagacttcttactaagtatgaaagcttggccttggcttagacttgttccaaagtagctcttataacttaaattaagattatattaatctacattctgccacataattcattacctgtcctccatactgtacatcctacttcctccatgtcctcactggcaaaatctctgcctcttggattctgcccttgagttcctctctctccctggaagttccacctatcctttcctgcccagttttggctgttcagctcttcattaaaattaatcagaaggtgccttttcagagacatatcttcacagtgaacaaaaagattatttcacaacattatgctttgtattataatcccaccctatttgatttttcttttaaaattgttccaactttagccattgggagagataatacattgtcaaaagatatattcactttagttgattttctatttcctgaattagtaatggagtgctatgaaaactgcacaaagcttcacagctactcttctctgagtatgattcagccctgttaactaggaaaaaatagcattctacacaagaaaagaattctagcctttgatctactaactatctgagaactgtcatagatagagggtcagacgaataacaaccagcaaatcatgctgtaaacttcaaccacctgtgcatatggcagtggtagtgggtcactttgttaaaaaggggaagagtgaaaaggggaaagaattgaaaagggaaagagtgaaagctcatgccagccagcatcatatttcaatacttgatgtgtgagtttccttggaggttttcatgtatctaatagccagcctcatcagacaagtctccaagcctttctgacaccagtgatcttatctactcaaaggaaataccataggggctgaagaaatggcttggagctcaagggtatctgttgttcttttagagtacccaagttcaattctcagctccaggagatcctatgccttcttctggcctccaccagtaccaagcacacatggtattcaacacacacacacacacacacacacacacacacacacacacacacaccactaaaaattaatccatttgagaaaaactagaagaaatctgatttaaaggcctatttaattgttacacctgtcttattcatgttactattcatgaatgttcagcaaattacataaagcaaatataggggggtagcaaagaagatctttccctcattaccaactagggtgacaccatcttccttattaccagctagggtgacaccatcatgtagcttttctgaaaaacttggccccacattgaaagcaggggattgaggagttggatgcatgccagtcccaattcttccccttcctttgggttgttgaggctgtgacacattgcccgtaaaatattcaagatgaccatgttattggttgcctggagaactgtgagagcctctctttttgctgtttgttgtgtgctctttgctctatgagggtgcctcattctgactacctgaaatttagaaatgtttaacctgaaaagcatattagaaaccacacaatgaacttttcaaacaaaaatgagacaaggaacaaatgcttccccaaatgccagctcttcatgacaaatgggtgagttcaggattaacctaataaaaacactgttaactttggaaagggagtggaaggggggataaggttttacttgatggagccacagggtttatttgctacagtgaaaatgagataataactacaaaaatgccgtgcagtacttaagttcatgcacagtaaaatcactgccagaaacaattatgtaactgctaccaaagctctcgaattactacagtaaatgacctggtctatgcactaattggagcatcatgacaagatctattttggttgttggaagtaccctacaccctggaactgttaggattcaggctgcccgagtatccagaaatgaactcaagctggactataggatttctggcagccagataaaagccagcattcctgaggaacttgtgaaactagttcccatctgccaaaaggagttattttccttacctctggcagaaaggatatatggctccattgacctgtacctatggctacatatcaaagcccatgctggcctccaggctcctcatgccagtctcctggctctccctgtcacccccagctattcactgtccttacaacctgctagtctctgttattcctgcattctctctctctctctctctctctctctctctctctctctctctctctctttctctcatatctgcaataaaaccttctctaataatgaaacagtcttgttgggagtttctttacagtaactcttcacaaaaaaggaacacatttctaagacctttttgcctaaatgttaaaaagattgatctgtaggggtctccatgcctggtcacagggcactttgtgtagtgctcctccaggctagtggaagccaggatactgcctcgggagaagggctttgagtgagaaattggctcctcctgggagccttagacatgacagcaggcattagaaggtacttagggtaaacaggacaagggcatcagcatgatctaacactatctgagatgaagccaaatcttagccctctctggagcttcaggggctggctagagtagctgtcctgggaagagcttgtctcttgctggagtgaccagggtgatgtggtgggggcagaattgagagtaccaccccttctttagtcctgttcgcagcactagaaatctagagagatgtattttttgtacaggtgtaaatgaacgtcaagagcaggtgaggagaagaaaatgagccaggaaatttgtgtgtgtgtgtgtgtgtgtgtgtgcttggatatgaatgtgcatggatgtgtttttttctttttcacctttccttgacctcctgagcctgacatgaggctaaaggaaaacatcacacccagggaaacttgcagccattcactcttccccagcagctctgatgctttgtctggaaagaccatttgaggagcagcaggctctccagcatgaggggtttaccagatgactaccagaacttgcaaatccctgggcaagcacatgggcaaaaactaatctcacaattagtaaattttaactcccacgtaaaagagttcccaaggtcgatggggtatttgttggctttggaggacggtgatcttccaaggttaaagaactgcagtttctaaagctgagagattttatgctaaagtctaaagtgttggcttcccttggaagaggggtctggtgattccagtttgaaagtcttccctggaggcgagcagagtcgaccttgttccccacaactctccagtttcccattgctctggcccaggctttgtttgtttctaattgtcctcagtctgctggcacatttaaatactcacctgacccgaagccagggttttgagcctctcccagatctacccagggagaaaagaaaacaatagtgacagatgagaggggcaccacgggggttgacaagggaactgggcttacaggagtgaagctggaggggaagaaaggagaacagagatttcctaaagaccaagcctgtgaaatgaggaatagaaaactaattattggaaaataatcttgactaaagaaccttgaggaaaaaactcaaggggtaggtacaacgttgtatttctggggtgcttaatcaaacatagctaacacaaacacaaactacgtgtgctttataatgacagactttataaactgaacatttataaaatttaatgatgactcgtgattctaagaaactctggggcaattcctccccttaagaaagcattttaaaatcacctggagaccattttcctacagggaagggttcaaaatctttagatatatttcaatttctggaagaaggaaaacaaaagaacccacttggtatgtatcttcccatcttttaacaaatggttaaatgctagtcttggagattaggattgtaaaggaaaaatataaagaggaaaatgagctcatacaggtttatctaagaaaaaaaagcggaatttgacttaaaatgttccaaacagtcccccaaaagctcttaaaatttaagaataaaaaaaaaatcactgcaaataacccagaaccacatgtggtcagagaggctgacactggaatcagcaagaaactgcttatgttgcctcttcaaacaaaaatgaattgttttgatgaatgagaattccttaatgggttaccatatgacatgccagcaattttttcaatgtcaaccacagaaagttttcatttgtcttttgttcagctacagctgcttaaaaataatagaaggtcaaggccaccaatacaacacttcccattgtggctgtgaagaggcaagatgtgcccacacttcacctaaggagaggagggtgaggcctcctccacccgaaacctccctattgtcctccctttccccacacagaggctccaggcagacatcagtgcaaccacacactctgtaagcatgggtgttgcgtggctacattaaacactaggctcacaggtcaaggattgtgtggggaagccttaggaggaggcatggcacttgtgaaggaagttgagttagaaagaacagaggatgtctgggggccacagtgagggaaaacagaacagagtcattgcatcttattccaaagtcccagagatctctttctctgtactcacatacgcttcagtgctgatgccaaatggaggcaacatagggctgagatgtaacaaacaatgcaaactttggaactgcaggagcagtttggggtttgagtataacaactacctaggagctgtttttgctaaaaagtcattgactcctcacatgggtccacggagcactgaaaacaagatgtagacctggcatcattgccttcattttgagtctgtctcctttactttgagttatctgtttacctcggcatgcaggcatggtaaacatgcacaggagtgtctatcaaacaaacaaacaaacaaacaaaaaccaaaccaagtgagtcctaacctatcccaatcttccttcaaggccaaaggcacagagataaagagcaacagtatcgtctcactgccccttttacaaagtccactccagtatcataaagggtgccttaagatcacccagccattgctgaaacccgagtcgccttggcttctaggaatagcagaacctcacagatagtgaggtgatgagctagaccttcacatctcaccctatccccagcacagttaaaagcaattgtgggaactgggttgtcctctcaggcaataaggacttctttgggtcaccccaaagaatgaggactgagataatgaacaagcaacccacactttagccaagactgcttaattatgtataccctcaccttccataaagctcatgccagagcccccaaccccacccactaccctggtgactttgagtgactgggtgcctttatctgtacctcccaacatggccacggtgattaagtctttttctgccaatcatttctggtctctttagttgggatgttgggattggtggctgacttagtctgtcagtaacccaagagattggccttgtgcctcgataccccagagacattagcaattgtaattcagatagtcctgaatgtctgtttcaaaggtggctttacaagtaggagctttttgtttgattgtaccttagtcttaaagatgttttctaggctggacccaacttctgggctccaggaatcctcctactttggccttcccagttactgggatttccaatgtatgtcaccacccttgggttataattttcctttcatttttatgtgtccaaacaagaacttccccagggtgagcagaactcagtacaatggatggggcacacacagcatcaggcagattgactaggttcatccctagcctttggaaggctccaggctcagccctcattagtgctccagggaacatttgtggtctttcctgccatctcagaaaactttggtttgcaagggtgatatgaggcccaggctgctcagctacagaaccagatgccacatctacaatgacatcagggaagactgaccatccagatcaagccagctggagccagcagggctcagttccagatgttgggaggaggatgatttcttcctgctgggcatcctgaggtgaggctgggtaaggccatccttctgagccatttgtccctgtgcatggagagcttcccaagctttagctgacccacggaaaatgtgaaagggcttctgagatcagctaagtctgtgccccttgggtttaatgtgcacactccatcaaatagcgggtaattgccatcttcctgggagtcaactgagttgggattccattcacttaacacttggagttttgggatagcaagacagttcaatgtataaacacacacacactaacacacacatatcatcatataacattgctgtaacaataaaaatagtaataatgtactactcagcagaaaaaaaaaaacaatggaatcttgaaatttgcaggaaaatggatagaactagaagaacccattctgagcaaggtaacctaatcacaaaaagacaaacatgggatgtattcactcatatttggattttagacatatagtaaaggattacctgcctacaatccacactgccagagaagctagtaaacaaggaggaccctaagagagacatacatagtcccctggagaaggggaaagggtcaagatcccctgagcaaattgggagcaagggaggaggtgggagggagctaagagaatgagaaggagagaagaggaggggtgcagaggacatgagggagcagaaaggttgagtcaggcgaagaatagaagaaaacaagaatggagataccataacagagggagatattttagggttacagagaaatcagtcactagggaaatgtctggagatctacaaagatgacaccagctaacaatctaagcaacagaggagaggctaccttaaatccctcccctgataatgagattgatgactgacttatatgccatcctatagccttcatctagcagctggtggaagtagaagcagacacccacagctaatcactgaactgaactggaatccagatgcagagaaggacaagtgaagagcaaaggggtccagaccaggctggtgaaacccacagaaacagctgacctggacatggggaaactcttgctcctcagactgatagctggaataccagcatgggactgatccagaccccaggaacatgggtttcagtgaggaaacctcggaaatctacaggaccccctgtagtagttcagtacttgtccctagcctaggtgtggactttgggagcccattccacatagagaatactccctgagccaagacacatgggggcgggcctaggccctattccaaaggacacgctagactctgatgacaccctatggaaggcctcaccatccagggagagcagaaaggatgtgataggtaggttttagttgagagtgggtggtaggggaggaggggagggagaagggaactgggattgtcatgtaaaacaatcttgtttctaattcaaattttaaaaaagtctgcaaaaaatgacgatgatgataataaaaactctagggtcctgaccaagcctcctcaccttgaaaataaggagtctcaggagtggtccagagacattgcaaataacagaagaaaactaatagtgatttcgagagacagagacgaacacgtgtaacttggtgccatgacattgtctcagagggtctgctgtctgttggaaggagtctttacactccagaaaagtctttatgccacataaggctgatcaaatcactgtactcccttcaaatttaataccagacctgaatattaagaaggttcagaagaaatggacaccatggagtaagacatagccatcacttgccatgagttatctttcctgtttgttagagtcaggttcgtgtgttgactaatagaagatactggttaggaaaaccagagattaagctacatgtggtggtattcccagcactcaagaacccgaagcaagaagatcttgtgtttgagtccaatctgagttgtgaaatctgtctaaagagaaaaatatggaacaggaagataaaacaagagctaagattactgtctagtataaaatactgttttttcatatttcattttttctctccaaaaccaaacatcaataccacatcaaaggctcatctagagcctcctctgccatgccctctgccaccttatctcatcaccacagaaccaaaagcaacttgaccaccaatcatgggcattaataaaacacctgaggcaatctagacagagaaaaggttgggttttgattcactgttttggagttcatggttttcggctctgttgctttgggcctggactaagattacacatcatggtgggaacactgtggagcaaaatgctcacctcatggccccaaaatgaaagacagaagtgggaagggccaggattctgtaatccctgtggacagtgacctaaagacttcccattaggctccacctcttaaaggtccacgacctcccaatagtaccaagccaagaagctttaacttgaactcatgcctttggggggcatcacagatctaatctaccacagcagggctcccatttatctaatatatcgtttatccagataatgcttatgcatagctcctagaccacagcactcccctcaggtgtcatcctcttacctgaacttgactctccatgatgtaggcatcatttagcacccatatctgattaggccttgtctatttcagagtggctgtgaactcctcttaggcttgtcaccactggctcagtgagtgcacacccttccgaggtgtgggctcacccaatccttcaacctgagaccttcctctcaccaccacccttggcttgcaggaccctcatcagagaagcttgctgcactccactctacgctctctgtccagaagaggatttggacaccaagaggacaggggttagcagaacccatctggactcttcagcaatgcatgactaccttgctatcaggagaagcagttggcctattatgtaatatccaaggcaagccaaggctagcttgcttgttgagatgaccccttccaggagatgttcttctgctgtcaggcaaagatacaggaatggccaatcttggtagtcactcctctttagcccagctggagagttgtgtcagtctttccaccactgtgacaaatacatgggagaaagattgacgggtggcagcaggatttactttggctcatgatttcaaaggtttcggtccaccatcagcgacctccattgttcctggtctgtgatgaggtaggtctatcctggtagacagtgtgaccaggaagtgggtggggagagagagaaggagaggtagaggaaaggggagggagtggggaggggacgctgaggttaaaacccatctccctggtttctgcccatggaaacccctgaaagcaatggtgccctcgtttctcccaggttgactatacaactggaatggatgaccaagaagttttgtttctatttattttccttgggagtaatttgtttttcatttcttcaggacagcagcggtgtggtctctccctttttggggtggcagtagagtccatatttacaagcccagtaaatatccctgtctggctgggtgtgatcttcttgtcagcctttttggcttctgttcacaagctccaaaggactatgacaaaaagcaaaggacactgagaccaggcagtcttcatcagccagtgctgtgtggaaggttgtgtcagggttagggttagtaaaaggtggcaccattgatgcttggggcttggtaacacagggacattttttctgagaatgaattatccagaaacttcctttcctgccaatcagtgggggaagatttccacatcattcctgttatttcacctaagggtctttccatactggtcaccaattagtttagaaactgtcaccaactgtctttccctctagaattgggttattagcagaagaaggcagatatcaggggaggaagtggcttagctgtaatgacaattcaccacctgtcaccttcaggttctgtctccttgctcaagccagcactctagggaccatttctggatcgtttctctgactcaaaccttccctcccccatgtcctccacactgcaatgtcctaccaatccagatttacttcgtgcgtattgtccacatcagcctagttcctgttatttccacgctgcttcacttcaagccgtgcctctcacctgcaaagtgtccattctcttcctgcccagctacccaggaggctgaggcaggatgaccacagttcaggacctgtctcctctacagactgagttcaaggctagcctggataactcagcaagaccttgtgtcaaaattaatcagttaatcatcaaccagtagggagccggtgaaatataaaaggggtatagcatctgcctgccacgattcaaccaggagaaggagggaaggcaaggagccattgttctcattaagggcatgctcctagtgacctaatttcaccccattaggcctctcctgaagattctgtcagcttcccgaaccaagtcttatcgacgtgtgcctttgaggagttaattggattagtcacttttcttgttgttatggaaaaaaatatagctgaaagaagcaacttaaagaagtgtttgttcggctcgcagttggaggccacagtcagtccatcatggcggggaaggcatggcatctatactgtgaggtggttggtcacacagcttacattatcaggaaacagggatggactctggtacttagctacttcatcttgtcactttttattttatccagacctgcaagcataggatggtgccatccacattaggaaaggatgggtcctccctcctttcctaaacctcttgaaacatcctcacagaaatatccagaggtatgtcacctagtgattctaacttcagtcaacttgtccataaacagtgcgtgttacagcggacagtccaggtccaaaccatagtactctggtctctgccctactctccaatctcatcggtggcatggtgaccggtacatagatcactagtgtttggcgactaatgaaaatgccatatatagttgttagttaaatgtgtaagtttgatgaatgaatgagtctaccttcagacttgcctactaggactgtgcaattgtctctcacaccatgtctacatggcgtaacaacagacacaaggctctattagaaatcaagtactgtcatgggccagagttgccatcccaggtccctggacacgttttacccatcctgccgctaattcttgtctttcttctcatagctcctcggaacgagaattccataatcttgtgcatttatcttttttatatgctttatctggatatgttcagtgagaattaattcaattttatttttgattagttaattatggttctcttgatgtataagctaatttctcaggacttaagaccttgactatcttaagaatattcttttttgtttgcagtggtggctcctataccactccactactatgcatccttccctctggtcctcttctccttgtatctcatggtcagaatgccacatgattctatactgtgggtttgaatgggttgtcagcagtctctctaatacagtatcctagaatcatcaaactactattgaactgcggttgcatagttaacatagaccaagttttatgacagacccagagttttcacaaaacaagaagatagtaggaccccttttcttaaatgaattatcatcaatatgaaatacatgatcagtttgctctttgaagttttgactaacagtcacatagaagaattctggcacagaataaatcctttatgaatgaagaaatgattcaaatttaaccttccccatcaaaacataccctttctggatgtgttttccactgattttatttatttatttatttatttatttatttatttatttatttatctatttatcgagacgaggtctcactctgtagttcaaggtgactaggaactcaatttgtaacccagtctgggcttgaactcactgaaatcctcctgactcagcatcctgactgccgaggttatagatgagagtcactgtgcctgcctaatggtttgcctttgaaagcagggccagcatttatgcaaacaggcatcgtcctgaatactctccactttctatatttagaaactgacaaccaaacaccaaccaaaacctgtctgactggaggcagatttattctatgggctccatgtctgatctgagtttctattgagataaaatattcaacagatcattgattggattctgaagtagtctcattttgtatataaaagctattaaggtacatggaaaatctcactgcttacacatttctctctgaatgccctaccaatcaaatgttaaaatagccttggctgaacttaaattaaaatttctttcatatttagaagcaatatgaaaaatagaaaattagcatagaagtcagtttggaagctccttaaaaagctaaaaatagaaccagctcatgatttagctataacatccttggatacacctggagggctgtatcacatagatacttcacattagtgtatatagctgtagtagtaacagtagccagaaaatggaaccagcctcgatgtccatcaacgatgaatggatgaagcaaatatggtacacacatacagtgcaattgtatttggccataatgaaaaaaatcatgacatttccaaagaaatgcatggaactggagaccatcatgttaagcaaaataagccagatgtagaaatatgaataactgttccctttcataggtacaacctaggtttaggtgtgtgtgtatgagtgtatctctatgtgtgcgtgtatgtgtgtgggtactgtttagggtttctattgctgtgcagagacaccatgaccatggcaactcttataaaggaaagcatttaattggggctggcttacagtttttcagaggtttagcccattgtcgtcatgacatgacatggtagcacacaggcagacacggcgctgcaaaaggagttgagaattctacatcgtgacccacaggcaacaggaagggaactataacactgggcatagcttgactgtaggagatttcaaaggtcacccccacaggaacacttactctgacaaggccacacctcctaatagtgccactccctatgggagacatttttttaaaagatttctttgtttattatgcacacagtgttctgcctgcatgtatgtctgcagaccagaagagcagaagagggcactagttttcactacagatgattgtgaaccaccacgtggttaccgggacttgaactcaagatctttggaagagcaggcagtgctcttaaccactgagtcatctctccagcccccaacattcttttcaaaccactacagtgtgtgtctgtatatgtatgtatatgtatgtgtgtgggcatgtgtatatgtgtatattcctatgcacgtgtgtgtccgtatgtgtgtgtatatatgtgtgtatgtgtctatatgtgtatgtgtcttgtgtatgtgtctgtgtgtgtgtctctctctgtatacgtgcacgtatttgtgtgtatatgcatgtatgtatgtgcttatgtgtgtatatgcatgtatatatgtgtctgtgtttgtgcatgtgtatgtatttgtgtgtatgtatatgtatatgtgtgcatgcatgtgtgtctatgtatgcttgtctatattatgtgtatctgtgtgtgtatgtgtgtatgtatttgtgtgtatgtatatgtatatatgtgcatgcaggtgtgtctgtgcatgtttgtctatattatgtgtatctgtgtgtgtgtgtgtgtgtgtgtgtgtgtgtgtgtgtgtgtgtgtgtaggccatgaaagtggaaagaggactgtgagaggagaggaagaaatattaagggagagagaggaaggaagaggagaggaacagggacaggtgacacgaagcagaaggggatctgtttggaaagggaccttgctgaggctctagcccaaccaatacctccctactgagcttcactcctacccacagacaggagcccaaacaatagttagtggttatcttaggccattctttctattttgcatttgcttcatttattattagcatatactcactgtgtaagataacgagaacagtatgacatttccatacgtgtatatcattttgtgttgcttgctccccctcaacacacaccttcttttttacccactacggactgatgttgtttccttttctgagcatatttatttttagctggaggaggtagtacacactagtaactccagcacccaggagacggcggcaggaggatggcatgcttgagaccagttttagctacttgaagccttgtcttaagaagccaaaaatatacatgtcatgctttcaaaatgtacatcagaccactttaggatagccacagagtcatgtgaccatctccactctctagttccagaacactttgttaccctatatccattagtggtcactgtccatccataccaccctccctgcccccacggactggcagtcattactttggttttcattactatggactttcctagttagggaattgcttataaatggaaacacacatatgtggctttcatgactctctttttccacctggtgtttccaaggcttactaccatgttgtattatgtgctagtacttgatatgtagtgaacccttattgctttattttttctcttcttaattaatttctcttcttaaagaattctttcgaacatgcataaaacaccgacataaatttccctcagactcagtatgttgaaacatatcttcactcatacccacatttagatgaaatattggctaaatataaacatttagattaaaagttccttaccttaattattttgaagatcatctctccatgacagtcgataattctgctatccatttgatttttgttcctgctaaggattgttttttcagtacacataatggagtccagaaccctcagatgtcaggagaccactctcccatttagctccacccactacctcattcctgctccaattaaagtcatttgacccttccataaactggaagaatattctctttggctttgatttcttccatttgagtgtaacacatctcatcaaatattttccacctctttgatggtttagcattggacacaacctttgattctcaaatttccttcctttctctaatcttgaaaatcctctcttacattgttgatgtcacatgagggattggagagacagagaattccttttggggtgctttagaccaggaatgagcccaaattccaattctctgtctctttctatgttttccatctgtttttggtttatgatctgtgacctgtctgtagtctgtccgtcctggttgtctgattgtccttgcctgtccctgttgttgtgtatttctgaacaccacagaaagcatggtgtagggttgaaatgagaacacttcttttaagcagggatctttaacagagtttcacaagggaagaagtaactttactgaccccaactgacccagaacagcactccaaactgcagacagatgctgtcaccctgcatccccggtgcttccagcatttatgaaatatttgtcattcaaggttgctttcaacctgaaggctgttttcaacaaatgatgaccactctcccctctctctccctctccccctttctttcctccttctgctccctctctctctttcctctcctccccccaccatggtcaggggcatggaagggtacataacttaacattaaaactgtgcattaacttaggttgtcaaagctgattttagaggaagtgctgcaaggtgtagtaaggttgtttgttttgttctcttaacggcaggttaaacttagacacagcacacagtaggaaagcaagtcagtaggacagaacatagtcctaaattttctcaaggcatattactaacttgtttgcaaagtctagacaaagatcactgtctttgaaaggaacaggtgttttcagaaaaaaagtcaatgctacagttttttaaccatctttctcactggttttgtcttttgtttgggaattcccatgatgctctctgatggtgatcattttgtttcaatggcatttaacctttctctcatccttcagtttcctggttgatttctttgagaattcccagcttgttcttccagctcactggctcttccttcatctgtgtcggttctgatcattatctcagttgtgtccagtgaacatgtcccccgaagactttgtttttctacaatttttaatagatttatcatagacacttctctcctttgggggactataaattacacacatataaaaacgcttactctgtaacacaattaatatgtgcttagagtcagatattggggttcaaacttcaagctgaagatcaaagaaacaaagcagcgagccattagctcttacctctacctcaggcagaaagcgctgtcctatcctcagcatgactgaagataaatctctccaccaaacctcagactacaatcctgtctccaacaagcctcagaatgcctcatcctttgatacctctcaaatccggggattaaaggtgtgtgatcccaagtgctgagatcaccattgtgtgagttgtttctctttaggactggatcaatttcaggtagctcagtgtggccttgaactaacagagatcatctgcctgtctcttaagtcctagaattagaggtgtgtgccaccactgcctgggtctctggctagctagtatggctgctgaaattaaaggtatgtatcaccattgcctggttctatggcttgcggctagctttgctttctgtaccctcaagtaaacttaataaatcataaataatatatcaccacatgactaggtgtccccattctcccattttatttttggtgctagggattaaacacagggtctcctgaataagagctgggtgctttactactgagccacacctcaagccctttcccattaattttactttttctggaagcaaatgggcacttggggggggggatgacaatgataaagaatgaatgatacacacacacacacacacacacacacacacacacacacacacacatatatatatatatatatatatatatatatatgaaaatgtaaatgcaacccattacttagtattgtaacctaacattttcacttaatggctagagagaggcagacagctggtgggagcatcttcctactccatccatgcctgagccttcctggggcagaaatcttgggagatcccttggaggacagctaacacccaaaagagggagaagggaaggagatgagcaagaatgtaaaacaggcgtagctcaccactgagagacacccgcttccaaccctgagccagccgggaaagcacaagcaagtctttcttctctaatcctcccaaagcaaaacctggcagccaactcaagacaatagtcaactgctcagggataatggaagtgacaggagaggagttgaaggtatggctcagtcgaacagcacttacttgtcatgtaggggtcagcacccaaaagggagggatatggagacagcataagaattttaaaagctacaaagatgacaccaactaacaatctaagcaacaaaggagaggctaccttaaatgccctctcctgataatgagattgatgactaattcacatgacatccaatagccttcatccaacagctagtggaagtagaagcagacacccacactaaaccttgaactgaactggaatccagttgcagaggaggactgatgagtaaaggtgtccacaccaggctggtgaaacccacagaaacagctgacctgaacaagggagagctcttggtccccagactgatcagcatggatcagcatgggactgatccagaccccctgaacatgggtgtcagtgaggagaccttggaaatctatgggacctcttgtagtggattagtacttattgatagcataggaatggactctgggagcccatcccactagacacaagggggttggcctaggccctatcccaaagtgtaagacagactttaagaccccctcccctatggaaggcctcactctcccttgggagcagaaagggtatgggataggtagggtgttaatgagggggggcaggggaagagggaagggaaagagacctggggttgacatgtaaaataattttctttgtgattaaaaagtaagaaagaaaaaagaattttaaatgcatataattaatagtcctggaaggagaaaatatgtttaaggtatctggtactttgtcattaattgataagtaactgatattggataaagtatggatgtgtctagtgcagagtctgattcatgattgagggcagttccaggtctggggagatagcccattggataaagtgcttgccttgcaaacatgaggacctgagttggatccttagaatccttgcagggaaagtcaatgaagacaggtggatcctcggggcttgctggccagtcaggccaaactaactggtaaatcctaggacaggaagaaagttctgtctcaaaaaaataaacaaatatgatgggaaatgttcttctgtgtatatgtttgtcttattggttgatgaataaaacactgattggccagccaggatgataggaaagactaagagacaaggagaattctgggaagtataggcagagaggagtcgttatgtgatcccaggaagtgacgtagctgggcagaaagaaaatataagcagggacaaacaggaaatcatgttcttctcttctctgctgagacactgaacagtcgagatgtaggacaccagaggagtaaggggtccctggacctttctctggtaagataagaccacggggagatacttagatttatagaaataggttaatgattaagaataagaaaccttagccaaaggccaacagctttataactatttagcgtctatggcttctttggggcagagaagggcggcaggacctagctgggccaagaaagttcacgtaacacaaatctctgggaagttcctggaaatgacacccacatgcaaggttgtgctctgacctgcacacacatgtacacacgtgtgctcttgcatgaaagtaatgcacccacacccactcccctcacacagcttttaatggaaataaaaaaaagaaggcctaatgagaagtaggagtgttgagaacagcaaagaatgacttctacaaaagtagattttataatagataaattcattttgggaagatatcttcatgtgatggagtgttttcttgcttgaaaaaaattcattatagaatttttttagaactgagtccctaaaaatatgactttacatatcataaatgtatttacactctacttccctgagctaatttagtgctttgaacgagtctcatctgtattgatatttaagtgttataataatgcaaaggtggcaaatgaatgttcctacctcaccgggacaaagaattcagcttcatgacagtgtgaagtgttagcatggtgacgaggggttgttgcacacacagcaacgctcccaatgcaatttgttgtcccaacaccttcacaaatcatcaaagattctgacttacgaagaatatttgccaagtgagggagtcaatgagccaagaccctcggatagtcaaacttcctatacttcacacaccccagccttgtcactacacagtgagatctgaggagggttccaacacctgtttcattgaagcctttcctttccacaggtggagtccaggttgcccaggaagttgcacagacacttgactatgaacttgggaccaggaacatgctctctgctggatcatttcagtgttctttccatcacctggtggcttgccctcctaccagtgatgttctcacagtcttcattcattcagcaactcctctatattcaagaccacttgaatctccatcaccagcggtgagaggttttccggggtcagtggtccaccatgcatcagcgccttttcactttgttgagacaaccacctcactgagtaaaggctgtaactcttccaacgtcacactggatgggacatttgttcaacatgtttaaaaataatgttcaggatactcaattctattaatgaggtggacaggtgtcactcgtgacttctaccaccgagatcataatttttagaaataagaatcgtcatgtgggaaaatattctcaccgctggtggaaaaaaaaaatcacgttttcacagagtttgcaaacagggaaatatttgtgggtttgtctcatatgttttgctttttttggcaaaagcaaaaggcagttttctttgcaacgaaaacggcctttcgttttcgccaatgcttcacatccatttttgccaagcaaaaagctgttttcccaggagaaaacagctcaatctgaaataaaagggaagcagtatttgtgaaaaatttccctttttgaagacaaaaatcactccactcaatgcaaatgtcacctggggactctgcaggaaggagggtaatgggagggcagctttggctatgacacacattgatatgagagtagctaggaaatagaaaaataagtccaaggtcataagtgaggcagatttaaaatcatgcccagaattaaaacacacacacacacacacacacacacacacacacacttgcctctcatacattcacaacagtaaatgtttgtggcaaattttatgtatatatttaccacaaaagggggaaagaatgtggtttcttttaaccaaggctatgattaagtataccaattttaaaaaataaagtatttggcacttgcctgcatatggcttggttgtttcatgtgtggggaacatggagtttcctcgacaagctccatcatgaatttccgggaaactggaaccatgtccatacctaacctaactccctcccaagatgtatacaagtgtggcacagtagaccataaatcactaattgttgattgtataagaaggattttcttgtttctgaatacatttcaatttaatgcatttttaaaaagttttaaacagcttcatggaaaatcacaaagatcacatcttactgggttgtatctcaaaactgcccatgagtacaacctcatcaacttcatttgtgtgtgggtgtggtgctggggattgaactgaggacctagagcatgctaagcaagctctctgccactaaggcagggtctcactgagctgtccacgttgaagttgaactcactgtgcctctaactctccttcctcagcctagcttggattacaagcctatcacatcacttgaatgtttattcaccattatccgttctctgtttaaggagatttcccagaacagcaatgcagcatgcaaccagcccagataccttggacagtgcctgggcgccctggtttatcccaactcactcaagtgactgactgggatgtttgattaggtgaaccttcataaagcaaagaaccaagaaaagaggagcgggccgggaaggaagcatcatgaaaaacagcacacccctgttactcaatcagagaattagagcactctgaaaacccttagggcaccacttggaagcctcaggcttcctgtctccttgtatgtccctggaggctaggcactcctatgagtctacatcagccagatggtagcaagacatctggagtgtgtctgtttatgggtgctgagttgtccctaaccaacaaaggaaaagggactgtggctggcttcagccccagtggctctggtgtgtgtgtgtgtgtgtgtgtgtgtgtgtgtgtgtgtgttgctagccctccagtgctctgcaaacgggtcttgggctcagcaagttcaggacccttgtctgtcacccttccctctccaaagcgaatgttaagaagctgacatttctgaacaggaacaaacacctgccaccagcgaatcgtgccctgaatgaggacacacaggagaacatcgggagtttgtaatgagaactggaggctgtcatactgagtgttaccaacagcaggcattcactcacactgaacacagtgtttattacagtcagccccacaaggagggaccactgtcatcatgcttcacactaccgacagcgaggtaggaaagtaccctgtttcctcttggaggtgcagcccagaacctctgcctctcagtcctcatttgtcagatgcagcagttcatttgtattctgctgggcttctgcacataaaatccatctccgagtgggtggaagtagccccaacttacttccatgctgttcacagagttattttcattattggtacattacatgctatctctgtaactcactgtacttggagaaacaaatgttggactctggaaagaggaaaatcggcttaattgccttaactctcttgtcaccactcatcaaatgcatgcatctctaagcctgggtctgaaccatcaataatcctgacagaaaaataatctgatgtggatttcagtggcagaattagtattctgttcaatgccctccatttctatacacaaataatgcaaatcagaagtcacgtgctccttgtcttctgctgaaaaacttacttcatatcatccaaagtcgctatttgtgtcttgcttgctttttatagtgctagggattaaagtctgtaccttccacatcagtgtggaccccaccattgagcaacacctccaaccctcctttttcctatgtttaagatttttgtttcaatccttagcactggaaagaaggtcttaaatataatttcaattatggatgggtaagaatttggtccagcttgggggagagaaagctcatacttagctgagagcctttcaagtgctaagcattttcacaggtctgtttcatcatgtttgtcttgtgatggttagtgttaattatcagtgtgatggaatcaacaatcacctaggaaggggcctctgagaatatctataaccaattatcatgattacatcaaccaagatgggaagatctgcccactgtgggtagcactattccctagccagggatccttgactgtgtaagagtagagaaagagagccaaacacgagtacacacatacatatgaattcattgttctttgctgttgactgtggatgttatgtgaccaagtttttcaagttcctgttgcttgtgcattcccatcatgatggactgtacctggaactgagagctaaaataaactattctttcattaagttgcttttgttggggtaatttagaacaacaacagaaaaaaaaaaaaacaaggcaggcctgcaattgctctgggtggtcaatcttattaattatatgctatgcataaggaaagagaggaatggagaggggaagtcccttgtaaattcttaagtagctaataagtggcagagccaacatctaaatcaagggctgtcacttttcatatctgtgtcctttctgatctattgcacaacctttcctagtgtgcagggcctctgggacaagtgctaaagtccagaatctttcagagcatggcagaagacaacagctggactctactcaggaaattgtgaatgcagtctgttctgatgcacacatcacacctggctcttgctttatacataacagaagcacacctggacccctacacatactttctctcatgtttatcctgtgttttaatgtccagttagccttaaattactctttcacatctgacatgagctttctaattctagagacagcaggatctattgagatggctgcccaaaacatccatctttaacatcaggatctcagggcttcgggatatagctcagtggtagactggatgcttaggaatgtggctctgtgttctacctatagcagagagttatggatagatgagatagatagatggatcaatcaatagataggtagatgatagatgagatagatagatggtggatagatagatagatgaagatgagatacatggatacatatatagatagatagatagatagatagatagatagatagagataggtagatatatagatgagatagatagatgatagatagatacatagatacacagatagatataggtagatgatagataagatagatgataggtagatatagataaacacatagagatagatgatagatagatagatagatagatagatagatagatagatagataattagatagatgagatagataggtcctcagagatgagagctgtgtctccatagccacatggatcacctgttgggcttcaataataggctctgttacttactggtaaatctcggacaaattgcttctctttgtgttttagtcaccttaattgtgaaattagatgaggtaactgtaagtaacagtacatccttcacagactcagctgggaacatcatgaattaatgaaccagcccttggatgacacttgaccttggcaaggtccctcagtctttgctgccatgtggcaacattcctagaagagagtcctttcttcctgaagagccatggcatggctggccaggagtctgaagacattcacacttactaggtttgggagatgcaatgtttctgttttctgttaaatgtgctttgagacagtcctggattcttcctgtgtgtgtaagggcttatttcccatttcataactctgttacttgggaaaggacagggcataactgttgatatcttactctgattaccctctttgactgagaagagagctcacatcagagccttcttcttgacttccctggcatctgttttaacaatacttcattccactttgctgttaataacttacacaatgcagtctactcagtaacccacatcataattctggaatgtattctgtatcctacaatggtttcacaggatctgaaagaattgcagaaatggaggtccttggcttcaagaggtatccttttgtcagtcttccaatttcctctatacctaaaggaaaccaattcattgatacgttacctttgtcatcatagtagccatcatccatgtgcacacttagatggctttgctcacactgatgattctcactatattctgatggctcagcataattatagttaagaaatgtactccaagtgtggttggcatatgtctttaaacccagcacttgggagacagaatcaggcagatctcttgtgagtctgaagccatcctggtctacatagtaagttctaagccagacagagttacgtgatgagatctcatgaagaaaaaagaaaggaaaagaaaggaaagaatggaggaaaaaggaagaagttgtagttcagtgacacaatgctgaggactctgtccccaccacagaacccccaaataaaacaaaaataaacatgtgtaatgagatctttctttaaaatgttgcccaacaaataatactggtccatctttaggggccaagtgtcactctcagccctggaaataatgccaagaacagagcagacatggctgctgctcctgtaaaatgacattttaggggaagacacagtcaaacacagggggccacacacactgagtattgtattgggtgctctgaagaacatagaggaggaggagagagagtaggatgtgggaatatgatggagtaagtcatgagggtgagagtaccaaggctgtttggaatgaggaaagtcttttctacagcagtaatgttcaagatggtgcctagagaaagggaagaaccagcactaagacagaagagagaagaagcaatccaggtagaaaaagaacgcatatttaagtcagagaaagcatgcccatgtgatcagacctagggagctaggggcagagcccacggttgtcagtgtggagacttgtggtataaggcagaccatggtggccattgagagtctatggtgatgactaacatgtccaaatcttgcactgcaggctagatccaatgacacaagggtccttttccttcttagggtagatatttcctccaactgcctacaccagaaattcccaacaatgccaaagaagacagaatcatgagaaggaatcagtttccttattttattttattgtttttgagataggatttcattgcgtggcagcagctagcctcaagcttgctattccatcagcctctacctcctgaattctgggattgcagacaggggcagccaatccacactcacgaatcaagttttagatactttgccaggagctagatggaaagagaagaaaatagatcttcagttctggtgctcctatttttaatgttgtggcggctttcatctggtctgttaagaagacaaagatgtccagggaatggcgattcaagcttctctgggtaacgagtttaattgctttaacatgaagtattggtatccgaaaaggaaagttaatctgttacagacacattcaaaattccagacacaatccatcaattctctaacagaaataacagctttcccccttgtctggcgatccaaacttaaatgaagatgaggtgcttagagctaggttttctgctatgtgctgaagattcgaaggccaatgttaacaagccaaagctagaggaaggggtgacacaaatccctttgaggaactgagtgtggaatgaaactcagataactactcagtgcaactcgatggctttagcgttaagtgccattgccctgtttcaaagggctgatttctcctagaatgtggtccaaactattacactaagtaactaatggaggagtatttaagagatgagtgcattctgtttgtggggtcttttccttttgttgcttgctttcattttgtctaaagctttgactctctccttacaaacctcaaaaagaggaaagacactggtctatggaagactacaggagagcactcactctcccacctccgtgagcaggaggcagagaaacccagcaatataggaatcagagttcctctcaggcaggtttaattaaatcctgcactgttaatgcagtgcttgtcagtggactctttaattaccttgaaggcaatcctctcccccatgttcattttccagatgacaaaattgaaaatcaagatttatgaaataatcactaggacaattaggacaaggttctctacaatctctagtctggaggtgaaaaaaatcatctcaccttccctcagtcttatgaggccagtgctcatcacggatcttccctatgaaccatcctaggcataatgacctccccaaccttccagaataaaatcatttttctaatgtttcctgtaagaatgggctctaaataaaaatttaaaaaacacaccacacattgcttctccatatttacatcttccaaatttacatcagaagtgaattttaatttaaggagcacagcaacttaacattttaagaacaaattagcctcattacctaatacaaaatgctgctcctccagctaccattctgaggtttttctttagattgcattgatgcattctttgccaccagaagccagtcttgggattgcagggtcccaggcgtggaggtgctttggcagctcagttgctgcatttggccaccagtcatcgccttttgcagatatcaagagtaccaaagtgaaagaaagcactaaattggctgaggaaagcatttggtgggtaaacactagagccacgtttccaatggccacctcttcgaggaacggtatagagacgccaggctcttgtaggacttctggggttttgacagatgagcaatttcatttcactcttcagtggtgaaaggtcagagccaatgccaatctgaagacttaggaatgaaaagcatgatagccaggcattcttattttgcaaccaggagcctcctttcactcccccaaaaaacactcccgtctcaggaagtgtttctccatgtcaactttagtcttccatttttatgacaattatacttgaatcataaatactcataataagtttttgtggtatggcttggagtttttgtatgacattttaatgtttaaatttatcatcttatagtaattatacacaacaatgggtcttgtgacatttccttacctatatataatgagttctggtcatattcacctccattacccttctttgggtcctcccactgtgctggccctgttcctcctctcagctgacttccttctacttttgtatgtgtgtgtttgtaacttattttaactagttgtcttagttaggattactcttgctgtaataaagcatcatagccaaagagacttgaggaggaaagagtttatttggcttatgcttccacatcacagttcatcaatcaaaagttaaggcaggaactcaagcagggcagggaccgggagctgatgcagaggtcatggagggaggctgcttactgtcttgctccccatggcttgctcagcctgctttttaaaaaatagaacccaggaccaccagtccagggatgttaccacccaccatgggctggaccctcccctactgattactaatttaaaaatgccccatagacttgcctacagcccaatcttatggagtcattttctcaattgaggctccctcctctctgatgactccagcttgtgttaaactgacataaaactaaccaggacattagtgttacctatagggatatgggtgggaggttatttataagagcttggaaaatttaccagaaaatgtctctccctcccctagcaaccatggactggttatagattataagagatgagcgggcccttgtgagtccctctgtcctctatggtgagatgttaacagactcattctagcaaaggtcttgtgcaggtggtcacagccgccaagactttaagagtacagtggccatgcgccatgccatgccagggagacacattccacaacattccagcttatcctctgcctcttacattctgtccattccctcttctgggatgttctctgatctatagagggtgaggtagggaggtatatatagatgtttcatttagggctaagtatgcaaaaagaagcatctctgacaaaaaaaaaacaaacaaaaaaacaaaaaacaaaaactagcactgttatttatgaggatgtagatgtagatttagagagtaattcagtagtcatgtctcatgcatttggcctaacagcagcatttgcctctccactagggtcattgaccttcccagtcacagtcaggcttttaacaatacttacagtaccaagcatgaatttcctcctatggcaagaacctcaaatccaatcagaaagtggttacctaataacagtcacaccactatagccttgtggcacattgtgcctggcaagtcagtagtgtagcacccagggtccacaattgagtaagattcttgatgacaattctcccctacggcctgcccagcaccttctggcactctgaaatctagccagcagggagggagcttccagatgagttccagttttatttcccaatgttctgcaaccaaagcatgtgctgtcttcaggaacagggtcttaccatctagttttggttggcaaccaacagcagtggaaatagtttgtactgttttagcggccaacaactcgtaaggagggagcccatctctggcactgggattttcatttaataaccttatggcttccaggagcagctttagccaatcgtacgaggtacctccaatccaactttctcttacttttacagcgttcatacatgtttatgttgtatgtgaagcatacccccctcataacccaccctcctttttctcctccagccctcttcccatatgggtctcctccattgtcttcttaaaccattttgcttgtattttcaggccaagcacacacacacacacacacacacacacacacacacacacacacacacacactcactcacacacacacacacacgtagtgatggatatataattttgtgtatctatataaaatctaagaaccacaagtgagagaacattctggttgcctttttgtgattggtttaattcatttaatatgttatcgtcattcacatctattttcctgcaaatgacataacttttttatgactgaaaacaaaaagtccgttacccacatcccacatattctttatcctccttagatggacatctatactggctccataatataactatggtaaatagtcctggaaaaaaaaaaaaaacctgatgtgtagctatctctgtgacacattgatttagagtcctttagaatacttttaaatataagtgcaccattcttgtggctctttcaagacgagtcacacagcccattttcctcacaaaccagcccttacatgttgatctcttttgctgtcctatgccgattttattctcttccttccgagctccctgcttccaagacctgagcgcaatattccaggggtgatcttgccaaatgcactgaattactccatgtctccctcatgatgggatgtttctacacatccagccccaaatcacattagcttctatggtagattgcaaacatggctaatttgttgtcttccacgccaatggtctggctgttttctgggccttcccttcttgatgcttgcttttgtggtccgccaaccccccctcccctccccccctcccccccaccttcctcaaagcatgggggttgcacctgtttcatccccttctcacttcttttgatccttcccatatttttaacctcggaaatgccacacagcacttctctttattcactgatgtgtttctagtcctttctgatttaatttcatgtggaaatctaattaacgtgctgtttactacatttttttccctcaggttacaaacagaaatgctcaaggaaaaaaaaaaaaaaaaagcaaaacccaagtagcattaacggggattcccggagcccttcccagggcctctcctcctgggatagcctgagaaaatgcaattaacttcctccagctcaggggatggttgtttcagccactttacaccattttgatggacagctgtgtctcttccctaatcagccaatttggagatagaacaattacaaaagacggcaattattggatgcagtctgtcattgcaaagatggaggctgagaagggacagaggaaagaagaaatggcctgaattccagtcagaggataaaaagaactcaactcttgagggagtgtactccctcagaggggagagagggagtgtactcccacagaggggagaggtgaaaatccaggctgggtttccagcctctctcacaggctatttctaatcacaggccaatggctgctgttcctgtgttttgttttgattaaagaccctcagagtttgtttttgttttatttttaatcgcaccctggtattaaaacaattgcttgcaattccttctctttctctttctgatttttttgttgtcataatttgaatatatttcactttgtttttttttaaagcaaataaaataagtggaaaaatcttcctgacaaaaaccagaagccacagaagagatagattcctgttccctctttcttcttcagcctcagtcattccgtgttcctcctctgagttcacttaagcacttgtctgtatctaatatggaaagctggaaattttaaaatacatcctttcccaagtttaataagcatagttttgtggtaaggttaagaaagcatcacaaaaagtgtatctccatttaaatatataagagtggagtgatttctatgatttttaagtagcctttttaaaaaaaaatataggagcaagagaacaaggcaataaaataaatcatgttaaaacttgtggatcttagtaaagaaattcttcccagcatagactgtcagaatatcatgaagagaaggcacagaccacagtaaacagacggaggccaggaaaagctttttcatattttagaagagagactcacgttagaagatctcaggaacattttacaaaggcccttgcttctctccaacatttttttccctctgttctcggtaggaaggtaggaaaaaaaaaatcccacgtaaagttccatccttcctgtgagggaggggaaagggagaagaaaaaggcatgactagagatgcccaaaggagctaagaattcctaaagtaaagtgagtgtgtccaccatcaaacaaactgaaactagaccatgggaaagttctaactcccaaacttcccggaaccctgaagcaggtggaataggcttcacctagaagcttccatagtgtttgtatagctgtggccccagaacatctgtagtcgaaagtgaggaagaacaacatgaaacacaggcaaatgagattgagcaccttcccttggctgtgtgatcttatgcatgttattctgtccctgtgtctctcccactttgccacacgcctcctccaatcagactgcaataatgatcaagccaaatgacagaaacaaaaccccgagcttcatagagataccagatatctcataactaagatttcacaaaactttaaatattttgttgtcactgagaacatctggaattaccatcaaacaacactagaaaacattcaattttttatttgttaatccttatctagtgatactaatgctttaattttcaaacaaactgacaagaacataaaatatgaaaatgtttgatagcacaggggaaagcatatgcttagtatttatgaggatctgggtttaatcttcagcatcaaaaccatcatcattaaaataaacttaaaaattaaaattaccagtaaatacttaattgcatatattttgttgttctttttcgagacgagatttctttttctgtgtagccctggctgtcctagaactcactctgtagagtaggatggccttgaactcagagatctgactgccactgtcaccactgcaaaacttctttttttttatttattcagcagtaatctatttcaaataatcaaaatttataggtatttttccacaagatttcaatcttggaattgaagtttatattttggaattagtctgccatttaattctaaatatttttgctttattttccattttaaatcaatgatatgaagttaaaaaataatttaatacctgatatactgaaataaaaaacatttaataatcaaacgatgaattagaagtaataagtaacagagtgaggttaattcaattcacttaggcacaagaattcctcaaacaacaataccaactatttgggaagaggctacatatcaacctactttgcttgcaatataacagagattaatcagactacaaatattcaccctgaaccctgtaattgctaagtgatcctgcaatgaactaatttattactcattggttgatctgcaaatggcctgagcatttcaacatggaaagcatgctattatttatatttagcctccagtgatacgtaagtgacaaaaccacatctctttctgtgtgtgtgtgtgtgtgtgtgtgtgtatgtgtgtgtgtgtgtgtgtgtgtgtgtatgtgtgtgtgtgtgtgtgtgtatgtgtgtatgtatgtatgtgtgtgtatgcgtgtgtgtgtgtgtgtgtgtgtgtgtgtgtgagtgtgtgtatgtgtgtgtgtgtgtaagttgacactgtcctgtagtaataacacatcaattacttttcgtgttgctgtggcaaaaatgtctgatgacagtaacataagggaagaagaattattttgttttaaggtctaagaaggagagcagttctttgtagcatggcagcaggagcctaagctgggtgatcatattgtatccattgtcagagagcagagggagatggatagccatggccagatggcttcctcctttccccccctttctttcatttcgtctcccacattcaggatgggtcttctcagtttcttctctggaaactgcctcaaggacaaatccagaggtgaagtcttcctagatgacttcaaatccagacaagttaacaatgaagatgaactaccaggcagtttgctaataagatgaatatcaaagaattatttgtttacaactgaagggctccttggtgattatacaaagatactgagataaaattagcatgtgtggaaagaaacttaatgatcaaaacttcataccatctggactcaatgaggaatcttagcgtcactgaaagtgagataatcaggtagcctgttcccacacagagtaatgcattaagaaatagatagcaagcaccaaccatgaggtgctcttgtcttaaaatcacccctgaacctagcaggctcaagatataaacaccagtttccaggaagtacctacagaaacattcccacaggaaatctgtgggatagaggaccaggctgtgatggttacttttctcatggttatggcaaaagcaacttcagggagggaggatttattttggctcatgatttgtgaggagcatccctcatagtgaggaaggcatgacagggggaatatggactctacaatctcagtgggctagaaagaagagagctcaaaatgggttataaaccataaactccaccccacaaccctctatgtgtcagttggaccttatgtctaaaagcttccactacctaccaaccagcaccaccagccagagactgttcaaacacaagagcccatttcacattcaaaccaaagcacagtctaaaagcctagggatagaagactccatccacccaataaatccatgaaatgaaaaaaaaaaggaaggaaggaaggaagaagagaaagacagaaagacaagaaacagtaacccttggagggtcctgatgtgagcaagccagatgcgaagtcacacctctgagataagcaggggactcccaaggtggattagaaattagatggtgttgaagaaagcgctgccttgcttttgtttgattgttagaagtttaagctgcctctgctcattaggaatgaacactgtaatctttcagagtaaaatgacattttgagtttggtttaaaatacttcaggggaggaggagagagaagggtgtgtgttggtggcgggtgggcatggcaggaggagagagaaaacaaaattaccaaaggatttttttttcacactggaacattgttttcagtgtgtgtacagtcctcttgagctgcttgttcacatcacaacccacagacccttgcacagtggttctgaagaatcagcagtctaataaaccattgctattcacatcaacctaagctgcaatggaacaacagcctaataacctcaattctgaattactctgatttgcactaaaaaccaaacaagatgtagtggtttgaataagaatggccccacaggttcatagatttgaatgcttggtcaccagagagtggcactattacgaggtgtggccttgttagagtaggtatggccttggaggaagtgtgtaactgggggtgggcagtggggtttcaatgctctcaatgctcaagtcaggcccagtgttaccctctcttcctgctgcctgctgatcagatgtagaactctcggctactctccagtaccacgtctgcctgcacgctgccatgcttcctgccatgatgataatggagtaaacctctgaacctgtaagcaagtcacaattaaatgctttcttttataagagctgcttcggccatggtgtctcttcaaagtgactaagacacagacaacaagtgctcacctcctattcactgagcttgaggaaaggagatgacatctctgcagagcctggtgatgttgaggtctgccactgtatcccaagtgaagacatttttgcccaatgtagtgaaaggtgtgggagtgtacagaagagaaagcagtagctacagagatgacgatatactctgttctgcctctttccctaatggcagaaggctcagcctggctccggcatggtccctaaccacagcccagaaccctaggctctgggatacactggataaagaaaccatcaaattatgaagatgatacgtaccacccacataaaactgaaaagcaaacccaacctagagctctgcacttgggaggtagaggcaggaggctcaggagttcaacgtcagcctcagctacatagtgagctcaaggccagcctgggctacatgaggccatgtcctgggggttaaaaaaaacacctaattttatcctgtgtctccctccctacttccaacaagagtaagtcactttatagctgtgtcattgcatctctctctctctctgtatgtactgctgggaactgattcctgggtttcaagtctgctagacaagatctctaccacatgacatgccagctccaatctgtgcgtcttagtcaacatacaacttccatggcagattgaggaagggaaaacattgccatcttgggaaggacctccaccccgtgcatgagctcttcactctaggagagctgcgactggcgggggggcatgggggggttgtgaatgatgcacctggaggccacagggaaggtagatgatggtgtctggatgcaaatgtgccttacattttaaacattatatatatatatatatatatatatatatatagtgccttacattttaaacattgtatacacacacacacacacacacacacacacacacacatatatatatatatatatatatatatatatatgtatatgtatatgtatatatattcccttgggtctttggcagtgctaatggttttattttaggtggctatgcagtcttaattttattcactatctccccaatacaatagatttctctttatgcccaggaaaacatgtacctcaagttaccctatgcacagcagtaaagctgctgcacataaaagaacccctgccggccccccaaccctgcagatccaagcacacactgctccccaaaccctccagggaggccagaaaggcataacactgagcaactgtttgaagggtggaacaaaagcacatccccctgtcttggagctaacagaaggaaaaggacatttacataagatgagacgccaataaatcggaaagttcaatgtgcttagaaatagacagtggcggggacaatgacagaggaatcaaatcgctgcagcagattgcatctttcatgtttcatttgcgtttaattcctaaagaaggcagaggttcaaaggaatggctcaccctcagacccctcctcctgaaaaacttctgcccacccctcagatgccagagcctagagacacccctgtttggtacacttgaactgatcatttttcattagatacttattgattagaagcaatgttcatctgagtctcagccacaaagtagtgtttcaatcaagcgaagatggacatttccagcctgttcctgcgtgctgacccatctgtcaccatctccgtgcccagagggaacaacaagccctcttgctactcttccatctcttcattgctctttgtcatacacaaaaatatacaggcaacacatgaatgtattttatctgtttgaagcagaaacttttctgtcagctcagtcaaaagatgcaagaaaaaaaaatggatagaattaaatctctgagtagccaagaactgtttcattgggttcaacccgaggttagaacaaagtagaagcaacggggaaattgaaatcagatatgtttaaatgactttagacggtgtttttttattagtaaaggtaacaatatgcagagccatctggaaatcgagaccatgtttttgatggtcatgaacttgacacccagggaggcagttaacccttactgggctgatttccttcctaaagtctcaggattgttgtgtcgtgctggtgatgaatgcaagttgacttcagtctgggggtaaactaggagaacgtggggcttactcagggacagagaaggtggtatcagctaggcttcccatctgtggtggcccttcatggaaggaacagagctaagcgttgatatgtaatgatgcttattataaaatctgaggccttaggcaagactgcgagctgatcttctttgccctcttctaacagaatgattgtcattcctgagggtggttactgctgtttaaaaattctgactattgatatttacttagactagggttcattcattcaacaagaatttaaggagcacctactatattcaagacagtgttatttgaaataaaaaaaacatgatttaccccattattaggtttttattattttataattaactaggcaatattttttaactttcctatgaggggaacagatttgggtgataataaaaagggtttatggcaaagcatggaacctgagatggcttgctgctaggcttgacaacctgagttgtcaaggacccacacagcaggagataaactctgaagggttatcctttgacactctatggcacaagtgtgtgtgcgcacgtgtgcgcacacacacacacacacacacacacattccccccacattcacacacatgcactccccccaacacatacacacacacacacacacacaaacataaatgtaaaaaattaagaaatgtgattctacttctaacaaacaagctgctttgttctttcagcttttcatctgatataaaataccattgcccaaaagattatgctatattgtattcttaattcaatccccaaattatagcacttttaaatgaactcagagccaaatcccactggtatttgagagtgtcaaatcatcatttctccatattttgtattccagagtttgtttttttttttctttttccaacctgttctgtagacaggtttccaatttcgtaccccatcttcaagtgtgattctacaggaaattgcatacaaatgggaaatactcattctacttcagaaacaaataaccctctaatttgataacaaatacatttcactttaaatgcaaagctcactttcacttccaaaaaatcggacctttatttcccacaaaactcctatgaagaaatcccattcatgaatttcatcagtaccagaacaaaaaaatacctaattgcctcttctatgaaatctgtatttatcaattatggctttctcggggaaattctaatttgcaaaaatgctctgcattccaagctttaacagttggaggtggatgtccttaaggatggaggggagaaaagttcttttttaaatggcacatttactaattataaaatgctcttatctcgctgtagccggagccaacatgaacatgtgccttgcactcagaaatcccaggattgtcacaacttgtgccagctgtggaggttatgacacctgtgccagcatcgccagctctgcccactgtcatctgttccaactgttccatctgcactgtttgtaccaattctcccatttctgcatctgtaccttctgcagaactgtttccaacaatgccagctgtgtcattggtgccaaatatgccagatgttctatttgtccaccctgggccaaatcaatgcagttttgtgctcattagttttagctggtagattctattttacaattttttgagatgtatttagattgaatctaggcaaacatccccttcacgatgataacacatctctctgtccattttctttgcaaccccaactttacatctgacagcatgaacttggtcggtgttatctggaccttgttaagacaactcaacagaactggttcaatattaattacggtagagaatctcctacaatgtaaaattatacaccacaaaaggccgtggaacacagcatcaaatttccaaagtaattaaaagagaataaactttgtcctgataaacaaatcgaggatgctcagaaatcaatatggtaagccgattagagtaatctgccacataatgtcccattaagctgcctgtttattggtcttctaattgacagagttatgcatgggaattaatggttatgtcgtgccctcccatctccccacttttctgagttctgctctggagagtattaaccaaggatgtgctcggatggcagggtgagacccaggaaccttgcttctcctgggttgaaccacgcaaactcaggttctagtcctccggctagagtctagtttctctgctctcccaaatgtcatttctactggtgccaacacaagccattcttattcgtatgctcttccagctttgaaattggaaggaaagcaaaagtttttacatgcccacaatctcaacattccacaccgccacaaaccaaactctaatttttctctcatctgggaggttctcttaagaacccgatgcttagtctctgggtttcccctcaattctttcttctcccatcattccccgggtggagaggacaagcgtgttgacatttgaaaaccaatggcctaccaggagtgtgaggtccaaagaatatgaaacctcctatttgctgactgtagattgattatataactgaacccttcagatgaagtaagttgcacccattagctaatgcttcaaactgtttgctatggaattcctgaccatgggtagaatgctagctcatggtcagaaccacagatctactacagtccattttgtacgagatgacatgctcagaataagcctctacagctttattgtgttttcagattccatacaggaaactctaagcccggaagtgcatccatccatcatggatgagctcacctagttacaccttcctagactggggccaggacactgaggtcctaaaacctacaaggccacgggcactgaatatttctgtgtggggacaacaccctcccttcaacatactgttcctttataaggcccgtggctgtttctcagtattctcccccattcctcctaccttagtttgacctgctcccgacctttttcctcagaaccctttccaaccctagggaggagactggataaatatccacttattaaaaacagtaacttcttaaggaaatatgcccggtgatgagctagatggatcccatctgagtctgctgaccttacttctagaaatgtcaccaactttttaattctaattttctgtgtttcgagatgccaggaaggaacatcttaattaggattaaaatagtctgtgactggtcgggagtgcaccctgtaccttcttggtacattttaattaatacaacttctgctccctgctggcaaagatgtttccgatggtgttttggcccaacatatttaccgccttcattgatgtgagtcacttgaatccttggagggacccacacacttcatgtaaaatagactaaacgttaggactgccaggtgggcgcacagctgagactgcttcccaacatctctctgggcttttttgatgaagtttcttaatacaaacaccccaagaccccaaaggatttgcacatacagaatagaaaactacacatttcaaggtcccaatggcaaagacctgactgctttagaaatctgttattgttacatccaggtggctacttttctggaatgaatgagccaccatggagaagcacactgcccgttgttccctagctgtttggagtcagcagagtcaacagaccttgtatgcttcttgagtattcttcttcctattgttcccatctcaaagtccacacttttaaatctggaaggagactggggctctgtccttttccttgcttcatgactgggcacctgggtttagcatactgtgtcctttcctacattagatgggacagcagttttatgatctctatccattaagacaacacagaaggggctggagagagctcagtggttaagaacacttattcttacagaggacctgggcttctcagaaccaacacagtggctttaaagtgtctgtaactccagtttcaggggatccaacagccttttcagacttctgagagcaccaggaacacatgtaggaaaaccactcatacacataaaaacagaattaataaatcttttaaagtgatattttaaaagacagcagggaaggaagcaatgactctccctggggtataatggcccagcagttactttggttaattgttgccattttcattattttctcattcatttctatatggtagtgttttcaggaaatgtgtcttgatgcactaatgttccaagacttgtactctagaagtctgactaaatgtagaagagacaaaggagggtgagaataggaaaagagcaagtcattgcagcaactcagtgcgaccaatgtgcaggccctggaaagccacttttctaaggcaggtcagtgctccctcttcactgaaacaatcccctggctggggcggagccagcacaacagcacagcagttacccccagtaccaactgaaaaactagcagcatctgaggttgaattttgaggtttacacaggaaggttttgttgttgttgttgttgttgttgttgtttttacagcatgttaaatgccaaaaaaggttttaatgaaactgggttaacttttcctgtctgggcttctgtttccagactcatttcttgcttcctctcatccactcaagtcggattgagtcacaggagccagagatagagataggagattagcttctgagtttgctccatatgctcctgtaggagtcgcctcactgttaaccttgctgtaactccagatacatcagaacaagtgttgggatgagtgatgacacagacagaagcatgttaaggagatgggtcaatgtgctggtatgtagtgtgatcacaaatacagtttacatacagtggtgtgtaaattcctcttggtacgctaactcttgatccacagggattggatgtacaacagataagttttgtttttctcagtaagcaaatgtttcaaatcatgttaaaagcaatacatagcactcctgctgtccaacccgtggactatgtcaaatgtgtgtggtccagatggctcacgaaggtggacaagatagtgacccctttatcctgaggcagcgacacttctgctagttacctcatctgctggtcatgcaaatattaccatctctctacatacaaagaattgctaactgaaattactgcataggaaacccatgcctgtattgaacatcctaagagtccgattaactaattagaaagtcaatgattgtggagcggttgggatgttgctggtctagagcctaattctcttgggccatcttggctccctagatggtcattcacgacccacctctgtgtacgatctacatcctggacgactggggaagtccttttggaatgcacaagcagctccttcctgtccaccaatccaacaactaagaacagcttcacccagcagctgaggcctctgggtgagggttcccaccccacctgtatttacaccaatgcatttttaaatttttatgactttctttgttctgttactgtaaaagctttgtgaaactgtcacacatttgagcacagtgtttggggtaaccaaaatctgtgctcctagctcagtcactcatgtttggctccagaaccaattatcctcttactgtctttgaggtatgggttgtgtagttttttaatatattgattggatactgaagaacaatgaacagacaagccaaacacttagaacatcattctggaggcagagtctgagctttaaagataaacaaaacaaaaaagaatcatgatgcatgcttagaagtccagaacttaagaggttgaggtaaaggatcatgagttcaaggccaggccccactggtttgttaaagacccccaccatgctgtaaagatgtctaatccctcacccctccctccctctccctcgtcctctctctctccctcccttcttccttcccctttcatttacaactgctttacttctgatgtatgcaatgcattttaacaaatgctttaaagaatcaccttgaacgatattacaaatgtacaatcaacggcatatgaccaaatgactggttgtctaaatcatagtattctggataaaacttcagggtacaaaggcccaccagcacccagtaccacccacgtctctattctcatctctttcagcattcgaagttcaatgaaggatacaccctctctctagctggattgccaaacgattactcagcatcttagggcctcactctgggggctggagagaaagccacatctttttgactacagttgatgttctgagtcctagagacagcctggctttaagcctataggctctaaattcattgtgggttcaaacagctcagaatatgagtacaacaatcaagacttaaacatcagtttagtgcttgagactgctatagtttttagaaatcgaatagtgtagactgtattttcttttcatttgctgtagctttactttgtctgctagttaatgtccagtatgcttatctgtttttgaaatgctaatttgggggctgggaagatggttcatcgggtaaagacacttgccatcaagtctgacaacctgagttcaattttctgggactcaagtagtggaaggaaagaaatgactagcacaagctgtcctctgacttctacacagtgtgtgtgcacagttcataacacacatgcatgcacgtacacacacacacacacacacacagacacacacacacacagacacacacacacacacacacacacacacacacacacacacacacacacacagacacacacacacacacacacacagagagagagagagagagagagaaagagagatggagtaataaccttcaaaggcaaattttacaaattagaatacaatatggttgtcatccaggccttggatggaatggatgggctatcatttcagtggtaataacaggttccctctaatcatctcatggcatcctctgctacctgagaggtaggttaggggcaggtggttggtagacaccctacctgacaagagaatgcgttcaaacagtgctatgtctgtggaagataaaccaagtactgtttgcatcatcatctaactgaactcagaccttttgctggaatctcagaatgaccagatgccttgtgttcccaatctctaaattgtcacaacaaagccatgcaacttgggtgcccgggttttcaagttggtaacaaacagcagtgtcatcttcctggactctttccttaggcctttccctcttagaactaagactatactgtagcttttggttgatagtcttcccccggagttctgtgtatcgtaagaccaggagtcatcggtgtggtgcaacctgcctgtctaaaaatgagaatgcatcttcataaaccttccaaaggcaaacactgtgctagggactacccacctaaagaggaggcactgagagtctccaaggattagcagaatgccacaaagggaacacaagtggcataggaaactgtgggtgtggacacagaggtggaggtgagctttgaaagggagaatgaggaaagctgcacttcacaacatcctgccatggtttggctttgtgctaaggttgaacatgagcaactccattttggttctgccaatttttacaagaaaaaacagtcttaaacttacaagaaaatgtgcgtgtttatgatgttcagacatatccttaaacattaaaagctctgcgtatgtgaaaatgttagcagaatcatttaattttattttgagctccttcagtgctgagggcagaaccaccagttccctgagccacaactcaagccccatttgacacgtttaacaagcaaaccaagcatgttagggctgataaagactaacagctggaaatagcatgtgatggcactgggttagagaactatgcagatctgtagatggaaaaagaaacaattctttgctctctaaagagcagtggtaatgtttttagcacagactaccttttcggatgtttaggaccctcgctgcagaaacacagcacatagggtgacagagctaaggtcacacagatatttgcagtctaacatttgcaagcagtggtcatgcagtaggcacttacataaccaagttgaaggtgctctggtttggattttgtgtgtcttctgcatagacatgtgcaaaggcttgcacctcagcatggcactatggggagacagggaagaccctgaaggtggggactacagggaggttttatgttgtctgtgagactccagtctctttctcatctcttatacacccatcataatgtgctgtctcacaacagatataaaggcaatggatccatacagtcataaactaagtcctctaaaactgtgactcataataaccttccttccttatgatctgattttcttggttattttattacagaaatagaaaaccaaccaccacattttcagcttcctcaaagccagcctcactgctctccactgaattaggactcaagaacaaattgaaaacactttttctagcatttacccatgcttccatggtgtgattccaacctaaagccttctcagttaagagcaagaagacaggctctattgaatagtatcagggtagagcattgtgagatgatttgccttggtcaagcccaagatagctaggagttttgtatatgttctagttgaaggcaattaagctaatgatttgatatttgtcttgtttgtcatttattaattttagtttttaaattcttattactgagtgtgtatgtatgtgtgtgtgtgtacaaggtaatgaattgaagctctcacatgagtcttatcctcaaaacacaccaggaagaaacagaaaataaaataaaataaataattaaaagaaagtcgaactgaaacaagacctcagaaatatgatctagggcaaagtgcacatcattgtaccttgcctcccacagcctgccctgtgaaggacgtctcttccttgagcatcctgtcagcttctgctcacctttgagagtctcaacatttaacactcattctgtttcctcccagaatgtttttccaaaatggcctaagcataccatatggatcatccagtctacctgtctgatggggtgctggccacctctctgcacagcctttttttttctttgtccctgtgccctcagggtcttcctcagggtctctccatagtacatgcccagtaggctttttctagaatagtcagtgctggaggcctgccttcccagtcaggatcattaactgcattgagtttttattttgaagccattggctcatgagtcagcgaggtctgagatatgactgaacacctgtttccggaggaataacagaagaggtggggttattgtttggggggtcattttagaaaaatcataggtacaaccacaaattctaatcataagtagggaaggataggggatgatttactgctggggacacctgaggattctggggcctgcataggcaggattgaggaaacatctctccatagtcataagccatgtgggcagttcctactgtttctcttcttagataaggctgcctcttgttgcatggtcttgaataagggaccctcacacacagatggctgggccatatgcacacaaagagagtagaaagtagacaaagtttaagactaaggggcctgcctggatatcttgttagactctacaaagatccttgctaggcaaatcccacccccagatctgcaggaagactgaatcggtccctgaggaccctgggatcctgactctgctgagatcgctgagctattccggcccccacagagtgcagagagtgcagaggtgaactgcttcggcccctgccttgggcccaacttccgcctgtccactctgggaactcctgcccaagggtctgcagacaggacgacttgacccctgaggaccaagctatgcagagtctggtgacatctctgcaccagtgctgctctcacccacctggagagcaagtgcctcagacctgcctgcacccaacttgagacccgtcagggtattggagtcaattacacacagctgaagagaacactggacccatacacattcgtaaaagaaacattattaaaacccaaatcacaaataaggcctcactacagttatagtgggagacttcaacaccccactctcaccactggacaggaccaccagacagaaacttaacaaagagacaaaggaactatcagaagttatgacccaattaacagacatttatagaactttttattcaaacacaaaagaatacaccttcttctcaagctgctgtaaaacaaaggagacagtcagcaagacaaaaacggcagcccacagactgggaaaagatattcaccaaccccacatctgacaaagggctgatctccaaaatatacaaagaactcaagaatctagtctccaaaacaccaaacaatccaattaaaaagtggggtacagaactaaatagacaattctcaatagaggaatctaaaaatggctgaaagacacataagaaagtgttcaacatccttagccatcagggaaatgcaaatcaaaacaactctgagataccatcttactcctgtcagaatgaccaaaatcaaaaacaccaatgacagtctatgctggagaggatgtggagaaaggggaacactcctccactgctggtgggagtgccaacccatacagccactgtggaaatcagtatggcgactccactttggaaatcagtatgatgactcctcaagaaaatgggaatgagtccaccacaagatccagcaattccactcttaggcatatacccaaaagaagcacattcatacaacaaggacatctgttcaaccatgttcatagcagcattatttgtaatagccagaaactggaagcagcctagatgcccctcaaccgaagaatggatagagaaaatgtggtacatttacacaatggagtactactcagcagaaaaaaaacaatggaatcttgaaattcgcaggaaaatggatggaactagaagaaaccattctgagcgaggtaacccaatcacaaaaagacaaatgtggtatgtactcactcatatgtggattttagacataaagtaaaggattaccagcctacaatccacactgccagagaagctagtaaacaaggagaaccctaaaagaaacatacatggtcccctggagaaggggaaagggtcaagatctcctgagcaaattgggagcacgggaagaggggggagggagctaggagaatgagaagaggagaagaggagggatgcagaggacatgagggagcagaaaggttgagttagggaagaatagacgataacaaaaatggagatatcataatagtgggagatattttaggtttatagagaaatcaggcactagggaaatgtctggaaatctacaaagatgacaccagctaacaatctaagcaacagaggacaggctaccttaaatgccctcccctgataatgagattgatgactgacttatatgccatcctatagccttcatccagcagctggtggaagtagaagcagacacccacaactaatcactgaactgaactggaacccagatgcagagaaggacgagtaaagagcaaaggggtccagaccaggctggtgaaacccacagaaatacctgacctgaacatcagggaactcttgctccgcacactgatagctgggataccagcatgggacggatccagaccccaggaacatgggtttcagtgaggaaaccttggaaatctatgggacctcctgtaaaagtttagtacttatccctagcatagatgtggactttggtagcccattccacataaaggaatactccctgagccaagacacatgggggtgggcctaggccctaccccaaaggatacaatagactctgatgacaccctatggaaggcctcaccatccagggagagcagaaaggatatgtgataggtagggttttagttgggggagggggtagcggaggataggagggagaagggagctgggattgtcatgtaaaacaatcctgtttctaatttaaataaaaaaaagttggaaaaagaaaaaaaaagatccttgctaattttgcatttgtcactgtctactgttcatatacatgtataatctactttccagtgtctgtctctagtcttgaatagaagtcctatgcaattctggatcctccaaatctggtccctttggtttttcctggcatcaccaccaccaccaccaccaccaccaccaccaccaccaccaccaacagtggtctgctctgattacaccctgtttatctcacataaagactagtctctgacttcactgagcttttcttgaccagaacctgggattgtacaaacaagtgtcttatctctgcctgggcactctgctctgttttcctattgctagtctttctctcccactgagaataaagctctctctgcagaattctatttggcagtgggggaaaaaaaaagcacaggactcccagaaatcaaagtagaaagggtggcagcagaactcaaggtcaccctggcaagggagactccccagggatctgcacctctgtctgatacaatttttgactaagctctccaatattagttaacttcagttactcaatccaccttcatgtgggcaattcccccactactgactagtatcaggtagaagtaatttctccacccttctctcaggcaaggttattaaaattatcacagaagaaaggtctttctgccccaggacatttgaactcagttctccctcagccccaatcactcttctcccacactaaggcataggttggtgccttcttacccttcataacaaggtattaaatgccacttccttataaatagggcttcccttgctctctaaaggggcccctctgtctttctctgggcccactgcacttccttctcagaatatgtaattacatgcggatttatttactcccagcccgtactttccttcaaaccacagactgtatagaggtatgcaccatgaccgtctttcctgcacgggaatccatagcacaaaacacagcccctaactctggttgagcccctccacgtatatctagggaaggattgttattgtcatgacaacaaccagtatcatttctttttattctggatactcccactgtccacaggaaggcacagggcccttgggctgtgatcaaacacttctagcaggcaggagcaggggacctggttatgacagcagtctctgagttcagaagtttccccctcaagcgcacagggactacatgacacccccaaggttcctgtgttgtctgctgcctatgacttccccagcaggctagttcccatgcacttgatttgggagccagcatggaccggccaagcaaccaccagtgccaatgaaatggtcttaccaggttttctgtggcacttcttttccatagggtatttggttctcagacatgggttctccacttatataaatgtcccacacccctactgaggagacaaagcaggcagatactccccttcaacagcttctcagggcctgagggaagaaacagggagacctccaggcttctggtactaaaggaagtttctgagattcttccctttgctccactctcttctctgcaacagccttgagccacaacagtaacaccagagggccatcagaaagatatgttgatttcaggaccagtgtcactcagccccacagttagggatctcccaaaagacccagtgtcacagactatttatacacatcagaaatgcggcataaatgagaagagaaaaggagaggaaaggggtggtggaggggagtcctattttccacaagaatttacagtcttaatcaatctggtttgatctctgtggtgatatattatttatgatttattaaagtttacctgagggtacagaaagcaaagccagccacactagctagctacagaagtcaggtggtggtggtacacacctttaatcgaaccatttgggaggcagaggtagatagatctctctgaggtcaaggccaccctggcctacacaagagtgaatcagtctaaaagagaattagagctcatgcctttaatttcagccctagagaggaatataaaagacaggagcccagtgtctcaggctgtattctgagatttagtctccagccacactaaggagagacagcagtctgaggcttgatggagagatcatggagacaggatcatccctttcagtctgaggtagaggtaagagctaatggctggctgccttgcttctctgatcttcagcttgaagcttgaacccaaatatcaatctctgtgtttcttttttttatttttcatgttataaaacttggcaaagtattagcttagcagttatttgttctggctacttttttctttctcttcattcctacacagcaggatatttaggtggatgcttgctcaggatacctaaaaggttagagtttgcatctaagattaattagaacaaggcaggtccctcttatgtattacaaatcgctagatttctgacctccattagcctttaatgatatgttagggtaggacttttggtcactgacaacatacatgagaggatcaactaggaaaaagggagaaatggctcattgtggctcatggtttgagccgctgatcattgttgcttagccctgttactttgggcctgtgatggcaccagacatcatgacaagaggtttgtccaccccttagtacacagaagacagactagagagaggaaggttgctggaatcccggtacctctacatgggcaagccagtgatgaattaccgtcctgcctccaaaggtgccactcaacatcaccataaactggagaccagacatccatgcagggccctttggagagatatttctagccaatagcaactcaaggaagggacatttgtccatccctggagagctcatcaggagacaactgtgacatgttacctaacttggggcaggtcaactatgtaactgacttgctttgaggtagctgtggcagttgttcagcagggtttcaccctgacacctgccaattgcagctggcaggaaattttccagcaagatttgtatttaatgtagaaagaactgtgtgcatgtgggggggtatggggggcatgggtgtgctaccatagcatgcttgtggaactcagagctgcttgtctccttctgctgtgagatacggagattgaatcagggcgtcaggtttgcatgacaagcactttcactcactgagccatctcactgctccagaataaactgtttcttaggaactctgcactgtaggcagagaaccgcaacccaaggaagtcagcagctcgggtggcgagtgaggaaaatgactcccgcttgggcttccgcagagtcttatgctatgcttgtatttttggtagccgctgatcaatggagaagattcgcagtgacaaaaagctgtcatgaattcagtcatacttttaaatagagccctttctaattaaattagatacagaagcatctacacacattgtcaaaacataatgagaatgcttatataaagcattctacattgggtccccagacaagacttggtgagataactggattccttgcaacataccattcctggccaggtgctgacagccctcatattttaatcgttggcttgagatactgtatagaaaggcctagcctttcgggcaggatgcaaaaagccatggatatggtgacaacccaggcatatcttcaaaccataagccagcaggccccgagtctgtgactaggtgggacgacacttacaggtgagtcccaagggacaaggccagcagacgtcaccacagtattgtgaagaaatctgtctatccagcaggctggggctcagggcaggacatggcttagctgaggtggcagaacaggtcagtggctgttggtggatggagagacactaggtttggctcaggatgtaggagggcaggtaggaaatcaggggtcattgtggagccagccgtaggaccacaaaggacactgggtgtggaaaggctagcagacatggcactgtgtggtgtcttgagtctatggaagcttttgactccattcatttgatacaattgagtctacagacatgttttcatcatcaggactaattctaggacccgagactagatgggggaagctgaggaaacagcatatcagccagaaagatgctaacaggcaaattcttcctaccagccggtggaatgttccagttcctaaagcagcatcatggaaaggggcagggcagagctggagagacaaggtccaccagggaagatcacttactgatttctccagaccaccagagttctgtccccagtatccacactgagtagctcacaaccaccttatctccagcttccagaagatgctacacctcccgtgccctgcctctgcacccatgtatgcagttgcatgtgtgtgcacgcacgtgtatgcaaacacacatacaggagttaaaatatttttaaaaattaaaaagaaaacaatatcacagggactcatcacatactcctcgagaccctgagaacttaagtgagttatgagttgagggaggagggagagaagtttctaagtctcccctctttgtatactccacttgcaaaacgcattctgtggggtaaaacattaatacttggggcctcacttcctaaaaaagaaaccgagagtggaacagctttatgggcagaatctttgtgggctctcttgattcaaatccttattgtgatgcaggagccaaaagcttttccacaccgcccccacaactcagcccgaagctgcctctccagactggaggatcgctcctagaaacagcccctccctgagccccgcagaaaagctgtgaagcctttgtctgtgcctcagaaacagcatgattaatgtggagatggcaatgcttttaaaaggatccctgagactggggatgttatctaactacacgtttctccaaaatgctctccacaaacctcaaagcattccccaccaaacttacccagtggagcagagggagaggaccaggacaatgcaatgcaatacaaacacacagcggtagtgtttagaatagtaaaaagttccagtaataagctaaagtcaaaacaatgccttgtagctgtgggagaacggggttgttggtggcggggggccgcgggagggggcgtggaggcacctctgccctgagactaaccttcatgcaaggcaataaataaaatcttcagaatgaaagggaagacacagcctaagaaaacagcaagcacatggtagactggggctctagtcatcactctaatgggtggcacgttttgccaatttctccctgagaaagacggattcttggcagtagaggatttgggttaacttaaggggagaattatcaggtgaagtccttaatcttcctttaggtctgtggtagcccaagaaagtccttcaaggtagcaatggttcctacccaaactagtttccacggagcacacgcctcaggcatacaagtcagatctgggagctccttcatctttcttctgtcctggcccctcccagtgtgaaatagaatttccagaggcaagaaaggctgggccaggtccttccccacttcacatcttcattccgccacataggccaagtccagcacacgtcaaccccacagggcaccaggccctggggagcagaaataacagcatgtcgtctgctctctactgcgtgtggctttgcgaccacggtccctgggatggagtgaccccgcccactccttccttcttccccaggaaatcctggctagcctcttcccccactaaactcaggtgacacccggggaattgaccccatccccgtctctagaggtaggtaatgccatttctccatgaatcacactgtttgctaggggttggatttggaacacaggcctgtttcagcctcttgggctatgtacgcattggatctacgttagccccaccagcctaggccctctctgctctctatccatgtagccaaagaagcatatttcagctgctgctgtgggtggctatctcagagccttgtgcagggagctcacatgtgcagatgggttgactgaggagtcgtggacaaacggagccctaattattgtatactagaaggttgcttgactcagaacttcctggtgtgcgatataatacatgccatgattttcttaaagcaactttggattgaatgttgctatttacagccaaaaacagactaactgatagtttaatctcccttctcctctttcccccttttcctcccctcccttttctcttctcttctctcttcatttccccctctccttccttcctttcttgtctatctatctctgctgtttattctagctgtgtgatgtgaccttaggcaaagtctttagcctcactagcctctggtgtctacgtgtttaacagagagctagactaaaatgacctgtgagatcctttcaaattttaccactgatagcagaagactgtagactttacagcacgtctactggaaggacaagtgtcatgctgaggaggtatgccattgaaacaagcttgaactcattcaagctgaaagcagagagttgccaaagcaatgagaagatgcctggagaggacatgaagcaagcacatgcaaacagcagccttcaagtcaatgagcacagaaaattaatgaggcaaactaaagctgtggacccctgagaatgaacgaggtgaaattaaactgaccacaaaattgtatgctcccttttacactcagtcaaatatatactaaattatccatcactctgtgctgctggatctgtctacctggagaagataaagatgaggggcttcaacagttttaatcatggggaaaggatggtagaaagtgctagaacaatcagagagacagaatgctgctttaagagtccaggggctgactatccatcttagagatatttttattgatgcatatccattgtgtattgtatgggattcatgaggacactatttatttatttatttaaatttcattttatattccagccacagttctccctctcacccctcttcccacctcttccctcatcccccaacccaccctgcattcactcctcccaaaggataagggcttcccaaggagtcaacaaagtctggcacattaagaggggattaagcccctctcccatgcattaagcctgagtgtggcatcctaccatagggaatgggctccaaaaacttagctcatgtgctggggatagatcctggtcctactgccaggggccgctcagatagtttcacaactgtcttccacatacagagggcctggttcagccccatggaggttccacagctgtcggtccatagtttatgagtttccatgaacttggttcagctgtttctgtggatttctccatcatgatcttgacctcacttgctcatgtgttctctcttccctctcttcagactgaattcccggagctcagactggctcttggttgtggatctctgcccctggttccatcagttactggatgaaggctctttgatgatagttggggtattcagaaatctgattataggggaaggccagtttgggcaccctcttcgctattgctaggagtcagctggggtcttccctgtggattcttgggaatttccctagcaccgggtttctccctaaccccatagtggctccttctatctttttcattgctctccctctgcatcccccaccaccatctcattccctcatgttctcatctcccctcccatcccctttactgcccccacccccagtttacccagaagatctcatctaatttaccttcccaggagaaatccatgtgtccctcttagggtcccacgagggcatcttcttatgtctacaatgtactttgagcatatttcccccacaccaagccatcgttttcccttccatattcacgtgtgtatctgcttacttggagtctccagttattgtgtgctatagttacccaatgccgccagttcaattcagagcagttttgctccagtaaaacaaacaaaagccctcctgttttcaggcttgggaatgtagctcagaagtagggacaaccggaggccctgggttggatccccagcagaataatgggggaggcaataactgtggaatctttctgtccctgcacatctactgccaccaagacaataaaattcagcttaagtattgttattattatattattattattattattattattattattattattattattttgtgtgtgagtgtgtgtggggggtgtcagaggacaactagcaggaataagctcttactactatgtaagcatcaaactcagttgatatagtggtgtctttacccactaagccatcttgccagccccagattgattgattgactgcttgctttagtttcattatgttgccagtgttgccagagcagcctctaactcctggctcaagcatccccttgcctcagccttcagagaagctaggacagtaggcatgcaccaccattctttgctgtagaacatgagcataggcaatggagtgactgtaaattcaggggttagaacagtaagtgcttggtcttgagaacttaagaacaagcatgacctgtgtcttttctttctttcttttttgttttttgttttttttttttttgtttttttgtttttcgagacagagtttctctgtgtagctttggaccccatcctggcactcgctctggagaccaggctggcctcaaactcacagagatctgcctgcctctgcctcctgagtgctgggattaaaggtgagtaccaccacccgcgtgatctgtgacttaagtagcaatagttatgagagcttgggagcagtgctactgagacctacattaggaagggaaagaacacatcataacattgacctgacagagcccaatgtcatatagtaaaaccttaccataaaaaccaaatcaatgctgcattgataaatttggtaaaaacacatgggaaagaagatgcctcacaaaaacagggattgggaagttgaaggaaggtggggatcgtgcttagctataataacgagctgagctgcaggcagcagcaaaactcgtacactagtagttgtcaactgtgggtgaccttggagtcatctgaagaaattcaaaaatgtcaaccatgatgcctgaaccccacctcaataaattttgattcagctgctctgtgatcctcactgctggatcttcaggcatgggttcccccaaacacccatgcaacaaaggcttagttctctgtttggcagtattgggaagcagagcctaatgggaggtcttctgctcatggggtgtgcccttggaaggcacaattgttcagaggttaagaatatctgctgctctcagcacccacactaggcaactcacaaccacctataactctagccctaagggatatgacaccctctgctgggtctaagaacacccaaatgcatatgcaaatacacaagccatcacatatatacataaattaaaatgcatttttccttaatttgttagaagtagatttattcacttttagggcagtgactctactcatccagaaagcagccaaaaacactccaagagtccaggaactttgtccaagattatatgctgagtaggacattggaggcttgacgtcgtggaaaatgttctcgtttcttgaggttgtgttttctaactcattcattcaacaggactcagtagtctatttattgttgttgtttgaaacagagtctctctctctgcatagcccaggctttctttgaactcacgaccctcttgcctcagcctcctgagtgctgagattgtgaacttacaacaccacagttcgttagtatgtttgtttgaactcagtgcattgagtagatgcatactgagcctccctggcagtacaagcacagttctggacattctgtctgcccatttgttgaactgatttcattcacagcttgtttttttttttttctcagattaccataaaaacctatggtagacacagattattctcaccagtgtacaaaagatggaacttggagctggcagggtaagctgttttgtctagaagttaactcataaagccacgattaaaaggtggctctttgaaacataaattttggaagaaaaccccaagaatacagaaatatggtccattacccaatggcctagaagatctgccagtgagcccactgcaaacctccagccatggctggacagccccacagaatctgactctcatcagtagttcatcacgcgccagggaccaggcactgcgccaaggagtcgcatgtgcattttttcatttaagttaataatctccgtaaacctgtgtagcaggcttttctttccttttcccacctttaaccctttgctttcttctttcatggaaaactcttcttctggaccccagcacagacattgcctcctcagaaagagacaaccagagaataacttatttcagggttctcaagtattccgaagacccttcatgtcctttatacttaaaaaagagggattttgttttgtttttttttttaaattttatgtgggttatattcactaacatttccacataaagaatgcaaagcattaatttttacttcatttaaataacaataaaaatgtcactgcaaggtaaaataaatcatatatttttatgaagaaaagactacatttttctaaaagattatttaagtggcactgatttgtagttttgcagttctctttaatgttcagtgtgagagaaaggatctgggttccataattcctttaccattcagcctgttgaaatacactgttttggttgaattactgaagaaaatctgaccttgtggagttatgtagttagaaaaacaagtaatatgttaatagaccttttagatagtaatatatatattcttctttggtatagaagtttctgaaggaactggtggcagtgtgaaatctaaaatcaatcatgtctatgactttttatgcctgtgatcttaaaatatattgccaggcagacacttggagtggctttttcacccattactgattttgtaacatgaactggttatttagaaaacagtagtttgctgagttatgctggtctttcaaatgttgacacatctcattatacccagtcaaaatcaaatgctgaagggatcaaccccatttttggcagccataacagcctaacacgcgcttgcctcaccttgccttggtctctaggaggtcagatgctcacctcgtggcaaggaaccaatcagaagttagctagtggggctatgctctatggctttgggtgtgctttacggacaagtgcacagcagtgatgtacagagcatagcaaccgccctgggtgggccataacaaccagttgaccaatcaacacagggcaggtcctctgagcctggaggcacaccaatcctgagcctgtgcatacccctagacactccccttatgctgccctataagatttctgtcccgtggtttctcagggtctttccctagccatctaccgtggtgggtggatgaaaggctcaagcttatggggttagctcgttaaacaactgcaataaaagactcattgcttttgcatcgaaatgggcctcttggtgatttgggggggttcagaatttgggcacaacaatgcattaatatcaacactgacctcatcaaaaaaataaaaagaaaaaagcactgggactcataccaagttatagtggaagacagaagtttcccaaaagtttaacttttacttgggagcttgaactttattattggtaacaaatattgttagttatttccctcaaaatggtaagctcagtaatttatttatttatttagagaaaaaaaattatccaagtcttcctaacagtgattttcccatcaatcattttttaaagtaaaagtagagatacatgaagaaaaacaaaaccaaacaaaacagctggttgagctaataactcaagtcattccccaaatgtttttcctgaagaaaaacctatgacattctggtttgcaacagatcctgctaaaatttgaatctgggatgttcccaaagggccacagggtggacagtcatttcacagtccacagagctagtgggcactggaaggacctataagaggaggggctgaaggaactttaggactacactagatcttaagtccttgaaggtgcactccagtgtcacttcctctctttttcctattctgactgatgtgagcagcttggctacccatctcatcaaatggtgcgctgacatacaaggagtccagaagcatctcttatggaaatctctgaaactagaagcccaaatcaatgtttgtaagttgagtattttcagtatttgttacaacttcaacatacttctggtttttacacaaattactgttagatgggaatcgacaacaacaaaacagagcaattatagcattctgtaataaaagctgtgtgaacacgttttctcaatctaaaaagtatagtttagtgtactgtatgtactcaaccttctccctgtgttgatgggagaggaagtgacatgtgtggtatgagcactgggacacagaccagagttctatgtcagggttatttgaacaaagctctatgatatatcaggagtcgatctgctaatcaatacggatcaatagatactaagttagtaacaggagggtggcctgtataaagtgcagatgcagatgcttgagaactattgtcctctctccgttgttccactccgttgactggttggtgacatctagcatgagacttccattatatgaaattttctttgtttctcacttagtatctatttcctgcacttgaatgtaagttcctcttgaattctaaattcccagggtctagcttagtaactgccacattacaggtgttcaatcttttggtctttgaaggtttgggttttgaaacagaatctcaatgtgtagcccaggctagcttcaaactcctgccatccccctgcctctgccccttgagtgttgggattacaggcacgtagcatcacacctgattgggcaatcattttttggttgatcaatgaattttctccactttccatatgaagaagctggaactaaagagatgggtactcattcaagttcatgctgagaggaggaagtgagtctaagtctgaaactgagtttcctgctgatttgtcactagtcagccaacaagggaaggcaaattagacagaaagtaccacaaaataacaacttacactcttggctacactaaagaataggtttcatgtctgtgagacctaaaggatgacttcctggcttttgttcagttcagctggttttttgtagcaaataacgtaagtgcgcccagttggaaccctaaggtaaggcagggttcgctagcctttgcctataagcttgaagcgggaatgggagagcccttctacacggaggcctcagcaggatgccctcaaccactccctgcctcttccttgtcccaccccttgctgttcacagcctaccatttccgccctactctttctgtcatcaaaagatatttgacacgcaccggaatgtagcagcaaataggaagttacaactttcctgtcccactcagacaatgaaaatgtcaagcaaaaccactcccactgacacagccatctcactcaactactgaatggccaaaggtgatattgataggggcacaaacagagctgtggctcccgcctggggtcgcagctaatgaggaagttgaggcaggaggatcagttgagcccaggagttggagatgagcctagacaacagcaagacctataaagaaaacaagaaaggagctgaactcaagtgcttctagtggccagccttcaaatctgttggctttcgtgggtgtaaccgagcgctggattctaacccccaggactacttacaattattttctcaactcagccctgcaaaatgacagaccatgtgcctactaggcctggcaccaaatgcgttctttcgcagacaggtcacccacataggtcatagcagagcgaaatcgttatcccacccgcctaaggactaagaggacccgtgtctgtctttggaggttaaattcctctaccttttgcagaaacagcctctaacccagtggttctcaacctgtccaaacgaccctttcacaggggtcgcctaagactatctatcgggaagccagatatttacattcaattcataacagtgggcaaaattacagttatgaaatagcaacggaaataatctcatgttcgggagtcagcacaacatgagggactggattaaagggtggcagcattaggaaggctgggaaccaccgaatggaccattcagcggaatggctgttgtgtcttaagagttgccagtcaacccaagcattcaaaaaaaaaaaaaaaaaaattcaaaaacaacaacaaaaacaggggttggacccagcagcctctccttgaatcagagtttgggacggcctgggtgctggggtgcagagtacctgcagctttgcgcaggggggtggggggcgggaggggagagcagctccatgcgggtcccctgatccgggtggttttcctgtgctggccccgcagaaatcttcaaaggcacgagaggaatgagcgaggttacaggggcgcattatcagcagctcgccccctttcactagcaggaccataatcccctctttgtgctcgctgcaaacccagagccacttgtaattcctctcccttttccaggtccgccgtggagacccgcctggctcttaagtctctcggtcctgcaccgggcagcgccgggcgggtggaggattccagcgcggccctcagcccacacagccgccggcagcgattcccacactctctgcctgagggtggcgatgcattcagatgagcggaggaagtggctcaaccagggcctggggcgggcagagacgatgacgcctcccatctgaatccttcaacgaaaacactttcaggatccttaaaagtgaaagtgtcgttgctcaaacaaacaaatatcccgttgaatccacactaggggcgtccaggggaaagaactagcttgagctcactttcagatcctcttagggctcaggattccagaaattggtccaaaactccctcctatgagtagaatgggggaatgggaatttcctactgtaggcacgactgttggtttgtaatgttccaccggatgctactgtgaaaaatgaagaaagacccgaaagaggagaaaagggaggtggggcgtggcacccggtagaaaaaaaaaatagtaaggaactttctctaggtgccaggcctagctgtacactgctattttatttaatctcacacaattctgggtgtgagacagatgttgctattcctcttttgaggatgacaccagagcatgcaaacctacatacacgcacacatacatacatgtgttatctgtcaggattccagaaagtggtccaaaactctctcctatgagtggaatgggggaatatcagtgttatctgtccaatccagaaccccacacgctagctcagaggtctgaaaaaactcatttccagaccaggaggccagcctagaggttttcagcaaactcacctgaacgagaaagtccctggagtcttgttccttttgttttgtaaaacgaggctagtgggcaggcctttgggaattcacctggtttcaggtcaagccccacccccctcccccaggtcttttcatctctctaagccccagtttctttaagaaagctgagcgtgatcactgttgacttttcaaaaatgttgtggaaaccagcgtgtttgtaagtactttgctgagtagaaagcacttctcaactgtaatttcacgttgtcctggttgagtggaggccctaatcacaacctcagagaaggccaccattgtgtctcatctcctcacggagacacttctgcctccattattattatacagagatggaaaatctcgttccaagaacccagcatcctatcctttactagaattcgttctttaacatgttgaatattgaatttaggttgcttcctacctaggcatcaagttaggcctctagaagaggaatttctttgttaggcgtgaggacagctgggaagcaccagctctcctcattagctgcctacccaggtcacggctatacaggaattttggcgagactgttcaggtccaaagtgctttttaaaaccctccatgaggatgagttcaaggacatccttctgcaaaggaagagaaaacatgcacaactctgcacacagctagcttgaaaatctgtgtcctcaggctggagagatggctcagaggttaagagcaccgactgctcttccagaggtcctgagttcaattcccagcaaccacacggtggctcacaaccatcctttatgaggtctggtgccctcttctggtgtgcagatatacatggaagcagaatgttgtatacataataaataaataaataaataaatatttgaagaaaaaaaaaaagtaaatctgtgtcctctgcacacagttgacagtaagcacttctctggactcttcaaccagcatgtggagatctagcccaaggaatggagtccttctgggagaaatgccttctatgaggtacagtggagcagaaagaagcctgcaagggtagggttgttgccttgctctagtttagaaatgtctcccaaactcaagtgttgtgccattggcacatggctgagtatgttgggtgggatctaacgaagcaagtcggtcactgaaggcgtggaaggaatctcctgactcgagtcctttcctccaccacctttgcctcccggatgcctcgacgctgtgaggagaacatgctgccacgatgctgtgccaccacacagccaaggcaacaggggaaatgaccgtggactgaacttctgcatccatgagtcaaagcaaaactttctttccttattacatgtttatcttgggtacttagttacagtgatgaaatccaattatcaggaatgttccctgaggcaagaatatctgcaacctaagaactctgataaccctgtcaggaagaaaacttatatcttttggggaaaatagaattctttctctactataaaatgcaaattatcaaagagagactcaccacctttcccattttactctactaatcagagaacgttgacataaacttgttcatgatgtccacctccacagtatcttacactgtaatgttctgtaactctgacttaataatttctctgttactatgctatatatattctaggtactatatgtgtattgtggaacatcagaggactgtaaataaataagacgataaggttctgatctctagctgagaactgagccttaactaacaccaaagggacaggattacatattaatgtatattaattaattaactaacataaatgacatattttctccagagaacttgaagccacttcagaagcagagagtttgtcaataaagccaaaacaatcagggaggttaatactcatcctaaaccaagtagtgttccatctcttagcaaataccgtatccagacaacctctgagctactcagctgcctctacccgctccacccactcccagccttggggctccccttacattatattcgcaagttgtctctgctttgtttatgttttaatgtctttcaaattttttaatgtaactgaatgtcacttcattttgactctggatacacagttacctactaggaaataggcacaagaaccaaatatattacattctgttaacatttttgtggcaatacttattatattatgcaaagtgtcctgctatttcccctttgcttcttatatccttggacattttcccatgtcagtacttaaattatattgtccttaaatggaaatacaatgctgaggagactaacttagttaatacatacaagtcatataaaaaaaagaattttgtttcagagaacttgcaagattgtctcttggggttctaaattcagaataccttgttggcagagcaggctcacaataatcagatgcagtcatattgggggctgtcttagctgttctactgagaagcctttgtttcagagtgaaagacagcaaggtaagtgccactgcccaaatattttccattataaaagcaggaaaccaaacagacagcactagggttggtgccacctgaagctaaattatcacttaatgtacacagagagcagctgatgtccagaagtgagcatcaagcttcttgctaacatgatgagcaatggccatctgtccccacaaagccaggcagtgtgaccttcagtcccagcattgccagcatcactttttccccatgatgaagggggaaggagggagggaaggcctgaagaattttctgttattggcagcaacaaagactaagttctttgtccctgttttattacaaaaaaaaattcaaatcaaaacaacggcagcagcaacagaggaagaaacaacaggaatctgggcaaaaagttaaagcacagagctgagtgattctagtttccttataggaagataatgcacataatcaatatgtcctcagagagcgaaacgggatgaatgcattatgctagaaattccttcatgtttccattagtctaaactacatgaaaatatcaagctggaacagaaggcacagatcaaaacctcctaccaccaaacgtctactgacaaacagcatccgacactcagaggtgactgctgttgttggcataaagtacacactgctggaaataggtgagagcaaatcgctgcaaagacacaggcgaggagttcgtgttttagaatgactcattaaatccttatgggaatgaatgcattcccccatttgtctgtaaaccaaatgcattcttcgacatgtctgtcataaagggattgttagcatcatcggaacaaaaagaggggaaggaggaggcttcttctcagtgggaatccaccattggacagagagtgagataaccacatccaagatcaacaccgccaggcatcatacaatgtttttcaaagccaatgacattctcatgatatctaacaaacatggttgtagcctgttatttttgtaaagaattccatttttcccataaccttttgcttagcttgttggatttttcaggtttgtaaaaaatatgtgtcatttctgaagaacttagtttaacacatttaaagaagcaggaagcattctagaaacaaccgatggatagtttccaaacagctagtatagcagatcctcagtgcttctagcacaaagaggtgctgagtatctacggtgacagatatgctaattactctgatttgatcattaggtattacatacaggacacatcacactgtaacccataaataagaagaataactgtgtgtccaccgaaacaaaaatactcttaaaaaaaaaacataagaaataggaacatataagacagaagtcggttgttctcttagcctgtgttagatcatgaggaaaacacttccccacagtgaaagccataaagattaatcattgttggactgggggtgtagttcagtggtagacttatagtttagcatgctcaagtctcaaggcttgattcccccccaatatcataaaagaatgaagattattcattatttcccctaaagagtctggagggggcatgcttcagaaggttggtgttctagaatacacctcctatttttctgtcttcctatgctctgtgtattggtttcctatggaaatgtctgtcatctcagactccaaagttgggtaacattactccatgtaccctaagattttactggcatcccagcaggcaagaaaaggtagaagtaaaaggcaaaagtgttgttcttcctccttcttttgggttgctgtttgtttgttttgttatcaggaccacctatctaatccaggctgccttcaaaactgaaatcatcctgcttctgccttctgaatgtgagaattagaaatcataggtcaccatagcgatgtcctaggttttctttggattcaggaggagaagtcctctgtaaatttcctcttgtgtattcattatttttctcttcacaatgaccaaatacccaacagaagcaacttatggaagggaaaatggactttgactgacagtttcagaaggctcagttagtcatggtggagaaggcctggaacagtatatgacctcacaccaaaacagccaaggatggagaaggggggccatagggtaaggacacgcccactggttgacatcttccaaaggccctgcctcctaataataccaccatcttatgagtcaatcaaaggattatgcattgactaggtcagagtcctcacgatataatcatctctggaaacaaagtcatagaaacacttagaggtgtgcttcactaacctcctactagtccaatcaaattgacaactaatactaaccatcacaccttctagcccattggtgacacagagtctcggatccatctgcaagccaatcactaacaaaatgaaaacaagcttctgctaatcacagttgacctctaagatgaaatcccaatggctgccaggagtaaagatgtgggcaagggcttctgggaggatgacgaacacaatctcaatgtctaacccaataggccaggcctcatttcctccccacactttaaaacatctatcacacggaactgccaggacttcaacaacagcaacaaagacgccccatggaaaacagccatgcgtggggtgggaatttatagttcatgtctgtttttatgtcttttcaggcattttccctgtggtttctcattgttctaatgttcatcttctgcaattcttatgttacctgtcagcacctctctgttaactcttgggtctccctctgagccttctttcatagcacaccctatgtctgaatatctttgcgttaataaatcttactcttttaattcttatttactacaaaaagcagaaactcaagtgactctactagtggatattaaattcaaagtgatattgttgaaactgtacctccagtatccaggattagaactgcccatggcaagaccatctgggcaacttctgtcagttttaacagagagtatgaccaaacagcagaggcttttaactgaaggaggaaagacaagaagggttcttgtcttaccatgcagtggctgagagctactttctgtctctcccctcagctcagctctacactagatgtcaagttcaaacctgacctatgtcaggacatgctcaagcaattgcactcccaagttctggaacatattgttttgtagcacaaataataaaaacccagagacagatgttggcattaaagctgaagaccagagaagcaaagtagccagccactagcgagttctcacctcggccagtgctcagactgaaggggcaatcatgttccctgattgcatctccagactgcactgctcctcagactgtctagactgcagactgaatacctgcactcctgacttcatccgccttatatcgtctctagtgctgtgattaaagacatgcagcaccaccgcccagcctctatggctaactagtgtggctgctggaattaaaggtatgtgtcaccactgcctggactgtatggctgactagtgtgtctagtttttcactctgatcttcaggcaagatttatttgttagatcataaacgaaaatatcaccatattgtttgtcccatccttttgaacattataaggaaaccgttgaccacccaaaagaaaatgaaataaaaccaaatgtgtgtctcttgacaaagaaggcagagttttgaaacttagatttgttttctctgtgaatatgccatgatgatttaggtctctgcacccaaggttgaccttacctggcaggtcagtggagagagcacagcctttaagtccaagggtggctgcctctatcttgttcttgacctttggggctgcagccaaggccaggttgcaatgaatcaactaaccctttgtaaagacacaataagaaggaggtgtcagtttagcttcctgtaagtttaggggtctacctccagcctggctctagcttaccttcctatgtcggaggccatctgcaacagaacaagtgaaggagctctgtgaggtaccaagggctgactgcaactttagactctaaagcagtggttctcaaccttcctaatatggcaacactttagtgtactttaatgttcatcatgttgtggcaacctccaaccaccaaggagttgtcacccacaggtggagaatcactgtcctaaagtaatctattttaagcaggggtgatgcgcctcccaacaccccactcctacttcacccctgtccttatcccaccccaattccagggaacggaacacatggcaatgcccagacatgttttagctgtcacaattaagggaagcgaggagactggaatggagttggtagaagcagcggtgtcgaataatcagcaatgcagaagccaggcctcatggcaaggaattgactggccccagtgttcctaatgctatagctagggaaccctgccataggtgaagacagtgtcccatactgaagggaaagcacaaactggaggcatatgaggaaggggacagggctgcaaagggctgcagtgatctctgcagctctagggatgacagtacaccatggccggagtgtgtggtgagcaaaatgacttctctcaaagatggaaaacgaaaagggggagattggagtcccagaattccattctagtaaccataaggcctctctgaaggcagcagtgtctaaagcctctcacctctgtacagccacattggaagattatgccttcagcacttgggcctgggagagggaaacacatttaatatgcaaaccacaacacctcccttgtttcttcttctgcttattcccaccctgggcaccacagcccaggtaaggtgggtccaggatggacacaattccttaggagctaaagtgcttaccaccattttccttcatgagtgactttacacagacagagcctggaatctatcttcgtaaatttccttaaagcattgatgctctgccattgctcctacattgctgtgggcatatggcacacagtttttacagctggaaaccagtgttagttagtggatcgatcagtgacctggcctcacttcctagttgttgtacttgtcattgaaatccttttgcctccacttcctcatctgatgaggagtcctccaggtgttatggggactagtgaggtgaaatgctttacaaagaataggtttccaaaaatgtcagccttctgtgcacagagaggtggccaggaatgcaactcacggaactggaacaaatctgacttttttgctaattttacctgtactttgtgcacgtgtgtgtgtgtgtgtgtgtgtgtgtgtgtgtgtgtgtgtgtgtgtgtgtgttctcattgtaggaaaagaactatgaacctttctgctcttatagcaggactaatgtacgtgtctccatgctttctactccatgcatctgttgcaagcaagctttaggatctacagcatgtattttctcattctagtgtcaaggggtgactaaatcaaggtcatgtcatcaagagcccactctccttctttatgttcttgcatgctcaggaaggttgcttttagtttcaggcatattgctttacagtcacaagatgactataaatagctctgagacttgtatcactacgcaatgatagaggtagaaatatggagagtttctttgctatttccttttgaaaaaatcctaaaatcctttcatagaaggtcacttctaggccgtctccctttcatatgtaactggccagaactgtatcacatgtttatgattaactaatcactggccatggtaatgacttgagcaagagtggcttagaccaatcaggattcaccctaggagtatggaagagagtacaaagacaccagagaataaatagacaagcaatggtcaactccaacacccaaaacattatatctaggctaagaagcatgatcttttgtaggggagagcttaaccacgtctactgggcctggctacaggtgtacctggccacgccccctggggcatgggcagggtgatgtgagagaggttttaagagtgaagggacacacatggtagtgccttctttttcctgctcgtcggcttgcactgcttactacgtttcctgccggctggctacattgctctgtaagtaaagcatatccccaataaatataccctaatcttcacctggctatgaattggtaattcatagttataatctttaatcatcatcctcaattttactgtacttaggatcatctagtagattggtgagcctagacttgtctgtcaaagtgtttccagagaggattaactaaggtaagaagaccctccctaggaaaaggcatcaccatcctcacactggtggggtacaagcagacttgtcacagccccttctctctccttcctgttcgccatgggcagaggagcacatgaagccaagtggtcattgacagaaatctctgaaaccaggagccaaaataaatttctactctataagttgttttctcatttttttttttaaatcacaacaatgagaaaagtaactaatatggacattgtgagattgtgagagtcccctcaatgccatcctgatgctgggtaagtactgtagtggctgtgcacagtgatgacatgcagtgtaagtttggggttgcttctcatcagctcatcagaaaagttcacttcctctatctcttgaatatcccttctcccatgttcctgttatgtttctgacagattccatctaaacttttatcaaaataattatgctcatatattttactcacctttaaactgagaaattaaaaaagaaacaagaaaaaagttttaaaaaaatcactacaaatcccactgctccagactaatcaatattaagatttgattggcatgattgaaggcatctctgtccatgtgaaatggataccaaaatggagatacagttaaggcaatggtcttcaaaagaaaggttctttcttgtctgacctttcagagaccaacagccacttcctgcctttctctccttcttcctttaagtgttcaaattgcttgtatcaggtattatgtcatcacaacaagaaaagcaattaattcagtgtctgaaagtagtgtctcccaaacagactcactgttctccccgattctcctatcaggcaactggtgaccgcattgctgtctagccacatgctgcaattccttattctgtgctttgctaggatactcctttctcacagtctaaccaggctctacctgttctacaaaggtcacaaccaacacctttacgtctcattgttgtctattttctttcccttcacagcatctagctttcttctaaagtcctcctagagttaacatctctagcactgattgattttactatttagtcttccagtgcttgttgcaaatgcctgtgtgacatttcctcaagtaaatcctaagtatctggagggtggggactaaatacaaggctgcagttttgcccagcagcaggctggactaacagaaaattgcccagttaaaatgaccatgcatggagctacacaaaagcaagagacttctgcctagaaggctccaaaggcagagacacctatctatacctatcgcccaatgatggctaatattcattatcaacttggatggatttggaattccatacaagactcacttcccagtatatctttgaaggtattcctagagaagttgagctgataagagacatctcaccttgactgtggacagcttaggccgctgtccttgttagctttctgttactatgataaaacactgatcaaaaccaactttcggaggaaagggtttatctggcttacagttccactttacagcccattattgaggaaagtcagggtaggaacacagacatggatctggggacaggagctgatatactgggtattcactttgcccatgaccttgggctctctggcccgatagaggtggtgcttcctgtctgtctatgtgaactctttgtttgtttgtttttctggagacaagtttctctgtgaaacagtcctgactgtcctggaattcactcagtagaccaggttggcctcaaactcacagagatccacctgcctctgccttccaggaagggggtaggaatcattgtctcttggttggtgaagaccaggtcagatgtcataaagcagcatgtgatcagtttccagctttccaaggactctgaaactggatttactgtatcctgtatttgtgagtatatttaccccctttcatatcttaaatccttgacaccccttaaacagatgcactcggatttctcattacaagtcgtgccccatgttgggcgccatatgtaaatggggttttttctcctgcccgccagttcctgaatcttaatcagttcagaggcttaattttaattataattgtttagccaatggccaggcaaaatagagccaaacagaaatacaggaaaatctaaacagagatatagggagaaagaaggcagagtcagtgagactccatatagctgccatcatactttgtggtaaaatataaaatattagaaatgggttaatttaattgtgggagcttgtgagtaatatgcctgagccattggccaaacaattataatgaattgctacaattataattttaattattacaattataatattaagcctctgagtgtttattcagaaactggtgggagggagaaaaacctccatttacaagaagcggagaccatgggagggcactgcttactggggtggtccctgtggttcactgaacttgctttgttgtgaaggacatgcaggacccaggctcaggaacggaaactcccgtagtgggctgggccctcccacatgaaccattaattacttatgctctccaacttgcccatagatgaaggcaatttctcaactgagatcccctcttcccagatgactccaatttgtgtcaaattgacaaaactaaccagcacagtcccagactgaataagaaaagaggtgaggagggggaggccagctgaggacttacactcagctcactcctgactgacaggacacaacctgatcagctatctcatacccctgctgctaccatgacctctgcaccatgatgaccccacaaaactgtaagccaacataaccccttccttctttaaattgcctttttgcttgcttgtttgttgttgttttgagacagggccctatatatacagttttgttttagtcttggctgaggtggagtttgttctgtaaaacagtctggcctcaatctcatagagatttctctgcctctgtctctgcctctgcctcctgagtgctgggattaaaggcatgggccaccatgcctaaccttaaactgcttcatgcaaggcaattgaccacagtgatgataaagtaactgacactgtttgctaatcacagacagtggtgtcctccaaactcatcacacgctttagtagaaaatacgtctttgctgggcagtggtgacacatgcatgaccacttcagcacttgaggcagaggcaggtggagctctgtgagtttgaggccagcctggtttacagctggggctgttaaacaaagaagccctgtctcaaaaagccaaaaaaatgtatatacatggttttgcaagtataaccatgtcaaaaaaagattttgcatgtctggtggtgctaatgtttgaatccagtgcttcatatttgctgagcaggagctctatcaccgagaggtttttggaaggaaggtattttcaatttgtaaacagtccaagtttattcactacaactgcaattgatcaaacgttatgtgctaagttgtggggaaacattattgaacttgatttaacagactctccttgggagattaaggggcaaaaggataagtattaaataaacaagcactgttttggtgggcaattcaacagaaaaattgcaagtgttaatggagtcaactaggaagcctcgccaccaattcagcgttcaggaaggctgtactttgagatgcttgcttaatgcaagagccgagggagctgcagtttctgtcctttaacttgaaaatgttccattggaagattattttaactttcacagcacatgctgaggattgacaaccagggcctcatgcatgctaagcgcctgctccaccactgagctacagcccaacccagagataagtaaacccttgcacacaggtgtggcactgaatgccagtacccacaggaggggtggcgtgacagcagggatgacatcttgaagacatttggcagtgagttacaaataaggacaagaaaaattcccagagcttctcactatgaaacagaatgccacggcagaatatctcctttgataaggaaattgataaaccttcccgtttgctggttcagtagctcacactgttggctggtttcaggctcaagatggaagtgccagttgcttacacttgtgcctagcacaattgcttttcctcaaatgaatcttgaaggcttggtttttatcattctgtttatgtgaaaaagctagatttttaagaatgtaattgcaaaagtgattaccaagtaaatattgacatattagtgtttttaaaatgctacctttaaaaatagatttattttattttgcgtgtataaatgtttttgcctatgtgtatatgtgtaccacatgcatgcctgatgcctcagggcccagaagagggtgttgggttccatagaactagcgtgatagagttgtaagcagccaggtgggagttaggaactaaactcaagtcttccctgcgagtagcaaattcttttaacttctccagccacaagaagttgcctttttatctaagactttgcatgagacagcgcatagttcctagaaacatactaactatatttcacattgcccagcaagagagagtgtgtgttttttgcttggtatgttttgttccagagggacccaaaaccaagtgttatagtgtgtgtctgtgtgtgtgtgtgtgtgtgtgtgtttctattgattttctactgtggcaacacaactttccacctaagagaacatataaactctagaaagaaatccttcctatgtaattgttgcagaaatatcaagctcatgtttcagagacaaaggctctgctagtcaccatagacagagtaaagtcccagtcatccctgttgcaaatgctgctccattaaccagctcctgccaaccaccaccatttctggtactttaaacagaaccaaaatcctagctgagtactatagaatcaggtaaggtgctgggtgggagtggggtgggggtgggggtagggtggggtgcatctcagaggtaggtagtttgcctaccacacaccaggaccccggagtaggggagactgggaagggaaaataagaaaaagaatctgggttccctgacccttgaagagattctaactgcagcaacagagtgagagttaaagaataagaattttgtcagggtccttgctaagtcaatccaaaatgggacccatggctaacagcatcttcaaaggggcctcatctactctgccccctttcatttcattttccctgggtgttgttctgtcctgactccccttgactctctcaattcccccaaacacaagcagaacatcctattacttttcatagtctcagcatgaggctcggaatctttttaaatggttgtagagaaaattaagaaatgaaccaatcaggaaaaaaactcttcactttaaaaacaaacaaacaaacaaacaaacaagtttaaacagggcctagtcctttggcccccataggtcttcgagaattccctgtgccccctgtgcctttttagtgatgagaaggaatcaccatgccctgaggaggtcacttccccatgagctctggctccaggttcaactccagaatgttggtgtattttgtggctacgactaggagtggatcactttaaacttcacaatcaacgcatatttataattgcacaggctcacagacctgagattgtaggttctgaaagataagagattccaacgaaagagaaaggtgttgtttgggatcttaacaaggtcctacccatagccatctcctggcttctacaaccccacgaggaacatcagtttccccctaagaactcgttgttaaattagccatgtctagatagttttacactagaatcttctgaactcctcagtcgtgagagaattgaagtagaaaaaaaacaggaaaaagaaagtgtaaacaagaggaatatacaagggctaaatgccggttctgtgggcagtaagacagcctcggatgcgcttctgtcgcagcctgggttgggaccgaataaatgggaggcaacagtgccccttcgcaaaactacaaatgaaaaacaagcctaggacatagctgtttagtaatgcctgcattgcgatgcctatttaccacggccctgcttaagcctcacagccgatgcgttcacaatataaacaggaaggattagagtgacccgcgtccccaaagactgcggcagccgggaaaaagctccggttaccttgcatcctgcgcagcctgccccttgatgacaaatgccccagattcgagcattcttttgtagttcatgggaaagcaggctaatccttgcgagcctgcccgcacacagcccagctccattcagcgctcccgcacaatgcgctctctggcgccgggcagcccgcagcagccacagcttctccaccgcgacctggcccgacccgcgctgccagttatgctgctatccctccacgtgcgggcatgcggctgcacagcggctgggagcgcagcgtgggaaagtctgccacggtgggggtgggggaaccaagacatggcaggctgaccttctccctccaacaattccatccattcccaccctttctcgttcctttgtttcctctctctctctctctctctctctctctctctctctctctctctctctctctctctctctctctctctctctctctctctctctctcctccctttctctgtaccctctctgtgctctaccatccctagccctccgttgttaacactaccaatataccaggtcatgggagcttttctagagagagggggtcatcacagtatccctgtgaaggaggcacatttcacagacaaggaaagtaaggcacagatgagcccagcggatactgaagatggaagcaggtccgtccgttaagctacacgttgccctggcagtcaacagcgcagatcacagatccattccaacctgaggcaggagtcagtgtgtacaaatacaaccgtgtttccatctcagctacctcatggggggagggaaatgtcacatgccgatcaaagggagtataaactaacccatggttgattcacggttcacggaagcatttgccgtcaacacgatctgcttgtctaggatgggcattctcttcattgagagcctccacttccaccacctgctccaggttccccccgccccgtgaaggagttgtaaatgtgcactgtaacccagttttctatcatactccaaaacccttaaaccatctacctgggatttctccattttcaatgctccttcattgtcttcatttattcctaggtacatggcacactacttccggcatttttcaggacaacgaggccaatcagtaggctactgcagagcaatctcctttcatccatgggattgaaatatagcccaggtagacagcccatggctttgttgatgatgtttgttttgttgagacaggatctcaccagctggcttgagactcccgactcttttacctctgccctctgtgtggagattaagactcatgccaccatgccaagcttggttcatgtatgtaaaatgagtgttatgttaataccagacatagccatgtttcccaagtctccctagaactgctgggtccaagtgatccttctacctcagcctcccctgtaactgagactgtgggttgctcccatagtgctggatggtcagggaaacttcccaagtgattacagaaatgaaagtaggagctgaagatggtagctcactaacaggctggtgtgcttagcatgtccaaggtccagcaacacacacacaatgaaattaaacacccaaaacattccaaatattaccccaccgatagtgtgggaagaaataatagctaataatatagagcctagctttataatttatgttactattattgtgtgtgtgcacatggtgtgcatatggagatcaggttcaactttgtggacttggttctttccttccacccttctgtggatgcccgggattaaactcaggtcaccaggcttgctcagcacctacctttccccacctagcttcttaagctgtgggtatgatcacacatagggttttataatggagtgtgtatggcatccacaacaatcagcaacagtaaacacattttctgaaaccagatggccaaaagtaaaaaagaattaaaattcagttcataatgaagccgaagtattttcagaagcagcagttcacataacatcatgtaacttcgctgcagccgtggatacaaacacggaacatgggcacttgacactgtgcatgtcctcatgctacacaatgccaatgaacactgtctagaatacctcgctcagatttgagaatatgatgctatgaattgcagtgtatttactgcacacaccaacttttctgctcttatagtaatataatggtctgataatgggaaaaatattattttcttaccatcactcctcagatgtatcataccagtttgtattgtgttggaatgtttgattttaaaaattgccatttgagggctgagaagattgcccagcaacagtttgccttataagcagaagaatgttatgttcaaacacatttgtttaaaagctggacatggtgatacttgcatataatcccagcataggggaggtggagataagaggatctctgagtctcactggctagcagccttgcctatttggtaagttccaggacacagagagacttaataaggaaacaaaaaggttgcccatgcttgatgatgacaccacatttgttcattgacctccacaggcacacacgtgtgcatcagcacacacaatcaacacacacacacacacacacagacacacacacagacagacaacagacacacacacacacacacacacacacacacacacacacacacacacacacacactgctgttttaattactgacttgaattcataacaaatcattaaaggaaaatttggcttgggattaggacagaatgtctagcagttcctgaaatggctctaaacatacttctgcatttttgtactatatattcatgagaagtgatattcttagtattgacaatttcaaaatcaaaatattgatcagctttacaaatgttgaaaagaggctggggagatgattcgttgtttgttacagtatttgtcacacaagggtaaggaccagagttggatccgaagaagtggatgaggcagtctccaataattccagcgttggaaggtcgatccctagagcaaactggctgctagagcagctatagctttgagctttgggtttgattggcagactccgtctcaaggattaaggtggaagagcaatggaggatgattcctgccattagctttgggcatccacactcatacacacacacgcttgcacgcataatcacaaagtgtgtgcccctacaaatgcaaaagctttcatacacacacacacacatgcataccacactcacacacacaaaaaaaaatagaaaaacatataattaaaaacattgaagattctctgtcttgcggtattcagccaagatgtaattcttcatgtaaaaataaataagctatattactttaaaagaaaacagagaaagccgagatttacgctttttctagagttatgtcctcagaattggagatttctggattccaatgaagcatgccttttaaagggcattttctaaagaagtgataaaataaatgactatgttgtaaaaaaaaaagaccccagacatgtattatatttgtttcccaggactgttgtaacaaaagtgctgattagcttagaacaacataaatttatttattgtcttccaattccagaggctagaaatctgatgaaggtgtcagaaccctgctcccctaaaatctgtgggagaatccctcttcaccagggtagctcctggtgtctactggcaacccacaccattgttgtgattcctgttgctataaccacatggtggcctttgccctgagtgtgtctctgcttgtcctttgaggacactggtcacattgggttaaggctttttcctaacacagtatcatttccttgtaactaactgcatcagcaatgacataatttgaaaacaaggtcacattccaagatatggggattaggattttagcatatcttttggaaagacgaaattaaaccccatcactatgtctatagtattagcttcttacagtcactgtctgattttatatacatgatatttgtgtcttggggtaaaataataattgtatgatatgcagattcaaagactgccatatcatgaatatttgagatgaaaagaaaactattatagacaactcaaaaggaaattcctttttatgatgaacttggtctcagctttcagtttctataaccaaagcgtttaccctggctcattgttccaaggttccagtcctcgatgtgtttggtgctgttgttttgggacagtggtgagacagcccattatgacgggaaagacacagcaggctgtttactttgtggtagcccagaaacaaagggaggaagaagaatggtacagtagcccttaacagggtaccccccaataattagacagcctttcagtaaaccccatctcttctatcaggacactgggaataagacaagctcttaatcctggggcctttggaggatgttccagagccaaagtatagcaatactgatatttaggtttcattcaagctggaagtagtgacactgtgtgtggtcctggtgatcaccagctccatcgggtctggacctgtaacaaggcagagcatcgtggtgcaaggcctggagccacacagctgcaaatgtcacaatagtcaggaaacagtcagggaggggcagaaagaggctaggaacaaggtctgtctttccaggtcatgctcccagcgacccacttcctccagctaggcctgccagttacagtttcagtcattccccaaaatagtactgccagctgagggctaagcctttaacaagaaatgttttttttttttttaaactataacactcccctattttaactaagccaacaaaacccagtaataagatgtgtgtccttaccagcaacacaagccacaggggtttggatactggcattagttttgtcaatatcaccatatagcacttaaacttcatcccaacctcaaaattacagcagtcaccagacctaaacatagtcctgtgccgttaaacccctatcactctgtctccccttcccttcaattttactactaatttcctttccaaacttcagaatcacagagccaatggccttctaatgtcactaactgattaatgtctcaatgttaaaatatccaaaaaaagggctccagctctccttcccccaaaacatgttctcccatcatttacacaatggcttacagctgctcttagaagtcagtcttcattcttcttccttttctcttattcttgtttccaaattctgtaaggatacctgccctgcacctcagcccagcacggctttatatacaatgtctaatttctgactgacgatcagtcagtcagaaatgtaagtagccaggcaggctccttccctccaaactccgcattctttttggcttatatttattgtccgtagcggacaataaatgtaagagtaagatggcttactcttccctaggaagcattgcactcactgtggcttccatttgcctgttcagatcctcacaaggcgttctttttccttatcctccctccctccttccctccctccctccctctcctcctccctccctccccctccctcccttcctttcttcctttctgtctttctttctttctttctttctttctttctttctttctttctttctttctttttggttttgtttttcgaggcaggctttctctgtgtaacacttctggctgtcctggaacttgcaccgtagaccaggctaacctcaaactcacagagatccacctgcatctgcctccgagtgctgggattaaaggcgtgtcaatcaccgccacttccttagccttccatctcacttccaatgtcatctacagcatatcttcctgcatccaagtttcctgcctgttccctgtctccttcctccaccaaaacacgagggcaagaatgttatctgtctcatcctttggccacatagtaaaggaagaaaggggcattaaggaggctgggaagatgtctctgtgtgtaaagtgcttgtcacacaaggataaaggcaggagtccagatcctctataacctatgtaaagtcaggtgtaactccaggactccaataagcaagatgggagatggaaacaagaatcctatgaagcttgcaggccagctaatccggtatttgtagcagcaagaaaacaaagagactctgtctcaaataagtggtaggcgatgaccaatacctgaagttgtcttcagagcttcatatgtgtgccctggcacacatctgcaatcacacatacatatatgcacacattgaagattgtggagacatgactcaatgggtaaggggcttgctacacaagcaggtgggtgtggtggtatgaacctgtaatcctagcatgcttgatcgcttactttgtacgtagttctcttgaagcttaataaagacaatgcaagatcacccctcagaaccacctccactgtgcggaggtattgatagctgctccacagagtcctcactttgcagggactatgaccttggttaagataatcagtgacgacacaaacacaggtaggaagtcctgtttaaatcatgaaattggacaccatatgtgcagtcagaaaggtatttgaggaaaaccaaacaagtgcaggatccgctacggacaataaataaaagccaaaaagaatgcggagtttggagggaagtagcctgcctggctcaagctttactgttttccttcccagcatcttgtgttggcaatgtacgtcgtacctctgggctgcacagagacaatctagatggtagacacacggcagaccctttctatgctaccacttttactctagccatctctcctcaacatgagaagcccctagagttgcaaggatccttacagagctctaattgtgtcttgtgctgtttagtgttaggcaacatgatatttttgttgttgtgatcttgtttgtttgtttttttccacacaccctttgcaggatagactgttacatacaaggaaaatttgcaccggttttgtttttttaatgacatattgttttttgttttcctcgtcagcattacatttgaaaggcttctttcccaggcaacggtgctgacacaggatcatatctgtattcagctgggactcccactgttctttaggggtaattttcaaatcttttggcacaaattgaagcacagttcccattgataaataacagcctcaagcttttacctccacacactattttgacaaatcaccaccccaaggaagggtttgtgtttgagagcactaatttgtctaaaagaagggggtactttcaaatcacacttcagaaaagtcatgtcaaagatgaggaataaaggaacaaatgagctttggagttaaggcatgaaacaaggacggggaactctgataaaatagactaagaagatcaaagctaacacagaagggatagtacgaattcaagcatttcttagatgtagaaaataaaggtataacagcatttcatgcaatcttgagagtattcaatggcacaaatgtcagggggacaggaaaagtggtaccttgggccacagtcttgaggacggggtgtgatagaccctctgaaggctcatgtactgagaggatgtggtctcaagctggtagtgctatttagggtggttctgggaacttctggagggggcatctaactagagaaaacagagcatatacccttaggatgctttccctaagcatctttgtgtttcatctgtatttccaggctgttgtgaagggaccagttttattgcaccatgcccttctgcttcagtagagtcagtgaccgcggaccatctgagcccacaagacaaagtaaattccttctctgcctacgttctcagagatttggtcacagcaacacaacaatccacctgtgagaaagtctctcaggtgtgacacacctatgaaatctcagcaattcagaagaaggctgaggtagaatgatcatgagttctaggtctttctagctgcatgacaagacctgtctcagagacagacagacagacaaacagatagacagagaggggaggcaaggcagggagacaaattcctaattgcagctaaagctgccttcatcatttcaatgaacaagtgttataacttcaaataacttgcagtacgagactctgttattgtctcattcccaactccatcaaaaagtggctcagcacaatgctgctcaccaagctactagatcatttgttgctgctgaaaactaaaaactgtaagctcacaaacctagtgtggtggtgacatgaatctgaggtccctgttgcttgggaaaagaagccaggagcatttcctgggcccacaagtttaaggtcagcctgggtagtataaggagtccccctcaagaagaaaaatgtcaaccccaaagtaactatttccacctgatctccttatgcaggatccttaagaatagaatctataaaaaagaactccaaagagccatcccactttagaagggttcttcttccatttttcttaattaaacttcatcccaagtaacctgtccctgtggctgtttcaaccattgcattctgtagttgttagcctattgtggagcttttactagtcaagccttttgggtttggaggctggctacgagaaagattaatttgagagaagactgttaggcacccaataagaatgttatccttccaaatgtttctgagtaaaatagacagtctagggttttgtttttgctgtattcatttgtttcgttttttcctagcgtcaagtcatgttatagggtttccaaaatgttcctgaagaattgttagtcatgtgcaatttaaaactacccacagactgtgggatgaaataatctgggtgaggggtggagaccagctatgccaaacgataaagcaataatgagcatggctatatggaatccttctcctgatggagggtatccttctgtgtatatgtttctcttattggttgatgaataaaacactgattggccagtagccagcagaaagtataggtggggctaccagataaggagaatgctggggagaggacacagagaggcttcagggagatgccatgtagccaagaaaggagtaacaggtcccgacccttctccggtaagataagaccacatggaaatacttagattaatagaaatgggttaataattaagagagagctagccagtaagaagtctgagccatcacccaaacagtttataatgagcacacagtctcagtgtgcttatttggggccaattggctataggacaaggctggaaagaaactccagctacatcttcctcctcctcctttcctcccctctcctcctcctcctttgagacagggtctctatatgtagcccaggctgtcctggaactcatactatgttgaccaggctagtctcttactcacagagattcacctgtcactgacccccaagtgctgagataaaagatgtgtactactgcacctggcttggaatcttccttatttacaagatgctggtttcaggcaaaagtctagaatattaattctacctccctggctgttctggtcctgacacatactaacaatactgccgcctcctatgacccagtgatgatctgagaaacacttcatgtgccctttccacctgcttgcatgcccacgtcatagatgaatggcatgaggctttcgaagagtaagtcaagtatctatggtcaccaagtgtggaactttgactctctggagaggcagtcacagttcttagtggaaaaaaaataacaatgccaagtttataaactgcagccaattatgacttggagcatgactatctagtcatagatgacttagcacccctcctccaccgttttcttagggtgctagggattgaacccccatatctttgtacatatcaggcaagtactttactactatattctcagcattatttatccccttaattttctggcagtacacggtaaaaacagagaaaggaactggcttcttagagtacaaatcatctttatgtactgacaagcaagtcggcacttagtatgaactaaactaaaaattcagatggtcgagtgcttgcctagcacacgtgaaatgctgagtttgatctccagcaccagataaactaggtgttgttgagattttctccggtgtggtcccagtcccactggactggtttttctccatccaattgggtccccacagctgctatgaaataaccactctgagatttaatatctactcattattgtttgcccattggcttaggcttcttactggttagctccctcttaattattaaccaataactattaatctgtgtatcttcatgtgaccttatcttactggagaatgcctgggtgtcctacccttctggcagctacatggagtctctctgactccgcctattacctttctctatccctgttttgatttcctgcctggctaaatcctgcttgtccattggccaaaacagccttattcatcaatcaataagagaaacatatattcacagcatacagaaagatgtgccccatcaaggtgtggttccacaaacctgtgattgcagccccccccccccccccccgcacttcacagaggtagaggcaaaacagatcaggtcaaggttgtcttcagccacatagtgagttcaaggacagcctgggcatgtgaccttgtctcaacacaaataaaaaagataggggatgtggagaatgacaagttatttcagcaaaaacaaaatatatgagaaaaataggctattgatagactttctggtagggcaacagaaataaaggagaggactggggaaatgacttagtgggtaaagtaattgctatgtaggcatgaagacctaaatttggattccccatatctcatgtagaaagccaggcagggtagtgtagtggcatcttccttgccagtgtatttgcattaatggctacacctctttgtgagtggcctcaggtgcggctgaaccagagagggaagcatgaggtaggacttgctcatgctttctcttctatcggatcagaagggcaaagaaacgctgcagcagttctttattatcgtctgtgtaagctgttccccaatgaaatacccatttatcatttatcttgggtctagtgaatttattatcacccgccttcagggtagtgcatacctataacaccagggctgcagagatggtaacggacacaggtagatcccaggggctttcaggccagccagtctagccaaagtggtgagctctgggctcactgagaagaccttatcttaaactattaggtagagatagatagaagaaagcagtcaacattactctggggcttatacactagtgctcgtgtagaagtggtctacacacacacacacacacacacacacacacacacacacacacactcctagaaatagccaggagaaaatgagcacttgtaaagggaggttacacacttagtaccacagctaaaatcatgcattgaaccttttctgtagagcccacactgaccacatcagatacaaatcacagcagccccagcagagccagtgttgggcattgggtactgctgccatcaacaatgctcttggaagccaaggcaattgctctttgctgctgtagcagagccattaggcagactcttgctgcctgctcttttgaatctccagagcctcatcagaagtccaggtctgggggatcttgttcacgtgtcagaggacttagtcatgggctgtctagccttttattttcctagtaatgggaggtgagctcaagattcctatggtgagaaatttttctttaggaggaaaaagatcatgctgtttatgcccatctcatgaatttaacattataactcccaccaagtacatttccaattagtatatgtgttttggttttccttagttttcttttggttttgtgtttattagttgttggtttttgtttgtttgtttgttttttgttttttgaactccttatgtaggccaggcttgtctccacctaccttttctcccaagggccggaactaaaggactgagccaccatgaatgggtgaagcagttatctctgggaagagaccaccagagacatagaaaccaaagaaacacactaccactggatggcagagcttgaacttgggtagacaagaaacttccaaggaaaagctcagggtagggtacaaacagagtcatactcaagagcacaaagcttcaaggctgaggatgggccatgttcccttccaaagtatattctcactcttagggttctgttacctcagcaagagaacaaatttgaagagccccaaaccctctgatctacttactataactattgccaaccagagggaatgacctacttggaatctgtgggcagctgccagctgcccaaggctccttgggcattacatcagtagttacttttctcatgcgacaaaagccacataaggaaagaaggacttactgtttaagacaggacacatttcaacatggcagaagaatggtgtgggagtatgaggtcactgatcagtctgcatttgtaattacacatggcacaagagtatgaggtcactgcttagtctgcatctgcaatcagatgcagagaaagatgaacactgatgcttaggttcctttcttcttttcattcattcaggaccctagaccatagggtggtgtgtctacattcaggcctaggcttccatcctccaattaaacttctttcaaataaccctcacagacagacccataggtacctcccttaagagattctaaatcccaccaagttgacaatcaagattgaccattatagtcatgttttcatgcaatgagaatgcaaccttaagaactagttactcatttatttaagtgacatcataagagggataattatgtaaggtcagacagaccagggttcaaattctggctttcttatctcatcagctgtgtgatcttgagatagacatttacctctctgtgtctgtttctccctctggagatggcagaggcaggtagagaatgcccttggacttggagtcatcatgaaacataaaaaagagaacaatgatggagagtcctcccttgtacccatgtgcagaaaaggctcactatctgaagcttttaagccatattctatagcagataaagccttctatgccttcctccctcatgagaaacagactcctctatgggcagcatctgtgctttgcttctcttggcccttctcctaagacaagtcatatacacagagaaaagaaagcctcctggatcactggctgggtgggtggatgggtaatttaaagactaaatacatatgcaatccaaaagaatgaaagcaaagaaaagggaaaggaaggagagaaggagggagggagaaagctattgtatgcaactccattttacagatgaaaagagctaaggtttagagagtaggagctggcagaatctagctttgaatccacgtcttgctgactctacacccaccttcacaggcgctcaacacaacacaatgcagcataacttaattatgaaagtaggtcattgcagaaggcatttctgttgcagaattcacaagccttgttgccaacttattatttattatttcattccatttatttatttatttatttattatttatttatttatttatttatttatttatttatttatttatttattttctaagagaactgagcagcatacgcttgaactggctagggtgaaggaaatggaggactgggcttgatgctctccaaggttctgaaaagcaaggtttgcaattcaaattttaactgccaggggaaaggtagcatcatcttatattggctcttcagtttttacactcagggcagaaccatctgtgaacggatgagaatgaaataattatgaaatttaggcagttcttaaaagatgaacttttcaacacacccacatccattcactaaaattacgggacatgaactctgcaaacagacttcctttacgcagttttggctttcctccacagttatgaaagtcaatccatgccagtaatgtctaaattcatgatggggattttttttaaagtactgcagtgaatatattctcctagtgatgcatcgttggccctggaacatggctgaggccagggtaagcatctggaagcaggtacctggtggcgtaggtaagaaacagccagtaggatgaggatcaaagtcagaattggcaggctggagtctgaaagaggaaaggaaatcaaagggagaggaggggagtaaagatctgaaataaaaaccaaaccaaaacaaaacaaaacccaaaaatccagaaagcttggaaggggccagtcagaaaggacatgcggctgtggccagcggcgagtcagagatttcagctcctggggagaaaggtatcgtttgctgtctctttctcttgatgccaactgcagcaatgctgttcctttccaagtctttctacagagctccacgggggttgacactgggctggactgacatctgccgctacttcttgctgcactctgtgctatttggagatattctattgatatcatcttctttgaccttgcttcgcttcccccctcccaactctccttccgctgtcctatttgtagcaacggctctcgtccactaacaagggctcttttatctattggtcttgctcttgcttttgtttctcttgtctatttggagttagcttcttgatagaaagccagcacgaattcactcttgtccttgagaaactgttgaacgcagccgacttgctagaaccagcatgtggaagtataaacggatcctgtatttcatagcagtgtgcctcgcagctttaagtttgagctaagcaaatgaccattttccttggcagaaattttcattatgcccttataataacaatcccaggccactgagttgcaaagaccacatgcacttagaataaataaaagaaccagttcctgtcatatggaccctggctctggctgtttagatgataccatagcagctgaagatgtttgctgtttgcggcatactaatggctctgactagtctgaactgagctttcttgtgaaagaaaaaaaaaagatatgaaagggaagcttattttgagttggtcaaaatcatgagctgggttaagaaaaattctatgtgtcgccaatttatggatacagacagatccacatacatagagatatatagacaatttttctgcaatgcttttgggtttacaccaagtcagaagcatcatgactttttcgttatttaagttttgtgtgctgactttatcacagcagtctgtcaacagcatttactggtgcctgcatacacagaacagtcagaggctgctcttgcttgtctgactcaatttagacagaacaaattgaacctaaaagtccatttaccagagagtgcccattgatctgtgtgctttgctgtactatccacctcttccctgctaacacggggtgtttcggaacttgaagatgaagagaattgatcctgaggcatagacaaagggtttcctgcttggtgggaaggctatgaatttggagttaggagtcccaggaaggagttctggctctgacacttacaagttgctggaatataagcaaataatttgctatttctcagttctagtttacagtctaaagtaaaggaagaagaagaaaaaaaacccaagcggactatatcacattataaccctaaggattaagtgaggccatgatgggaagcagaccataaagactctacagtgcaaggaattaggaatcttgatgataatttaacactgtggctataaaacagtgaccacaaattcagaagctagccacttgaaattattgtcaacctattctcccaagaacaagttaatacgattataataaattcaaagtgtgctttggtcacctcctatggggatttcatttcaccagatgaactattcagaaccgaaagaaaaatcatttgtaggggcaggaagtaacttggttcaacaaaggtcttttcattttaacaatatttttataatgcatatactataaagagaatcatttaaataatttaggatatggaaaaaataaaacagttcttcatattttataattattggccatctcccaggcacaaagtccataacaggaccattggaagggacacgctgggagacacatcctcacggagagttagcatgtggactttctaagacacactagagatccagtgttcagagcatgctctctcagatgcatgatctccaaggaaaggaacattccctgcttaattgaattcaccgtggactagaggaagtatttcaagtgccaagtcagttgtctccagttaagaactgccaacctgctcccacaaacaaacaaacaaacaaataaacacaagcaaactccccagacatgacatgagctgtcatcataacataatacatcttctcaaaggaagagagttaccttaacaccaacaaaatgtgtctggctggaggggtgctgtaactcactgttacaccgcctgcctaacacgtgtgaggccttccattcaacctccagcattgcaagagacaaataaatagacaaataaatagtgagatagccgtactccctcataacaagcaaccctgaaaacacaatcatttggcttcttggaaaactgaaaagttgtccttagagtcatcattttcttgccgatgctggttgctatgctgatttgatggatcgatggttatctagacatcttttaccctgaagacaccatgtgtatttaaacaaaactgtttataggccttgtagctcaaaataatactccccagttggaatatatgagcaactatttgtatggtgattgataattttgccctttcagggcctcggactgtcacgtaacgtgttgatgaagcagtagtttgatgcttctgtcaatgaattctggtcactcatcaccattcagtgattctgctttaacagggaaaaaatatctattgataaaacagcataattttttcttatatcaagcatctgagcaaggttcaaggaggtggcacaccatgctatatgggagatcaagacctgaataaatggttcctctctttttttttttttttagtttaaaaacaaacattttacatatcaatactccacttccatctccctcccattctcccatgcctcctaccaaccccccaactcaccccccacctgctccccaaggatggtgaggcctttccatgggggatcatcaatgtctgtcacatcatttgggggagggcctaggccctcctccctgtatctgggctgaagtagtatccctccataaggaatgagctcctgaagtccatttgtgcactagggataaacactggctccactgttagaggtcccatagactgtccaggcctcctaactggcacccacatttagagggtttggttcagtccagtgctggttctccagctttacgactagggtccctgtgctctcactaggtcaggtcagatagttttgtaggtttctccaacatggtcttgactcctttgctcatccctcctccttctctacaactggattccagtagtatggctcagtgcttagctgtgggtgtctgcttctgcttccatcagctactggatgaaggctctagggtagcaattaaggtagtcatcaatctcattataggggaagggcatcaaaggcagcttctccactactgcctagattcttagttagggtcatctttgtagatctctgaacatttccctaatgccagatttctctttaaacctatactggctccctctgttaaggtatctcttttcttactctcctctattcctcccctgtctcagttttcaagaactcctgagcaaattgggagcatggtgggggagcaaggtaggaaaaagagaaggggagaagggaaggggagaggagaacaagagggatcaagaagaataaatggtttcttaacagagcaaagaaggagagagagagagagatttcctataaatggaatgaacaagattgtggctatatgataacatttcaaactttataaatgtgctatacatagcctttccatttagcgtgcagtctgcctctgcccagtagagtggctggaaagcataataattgtttctgtctaaatcaggtttccttttttaaagctcctggagggactgagttgatttcttgtccttattttctccctgtctcccagcctatttgaacagcagcaaatgcagaggagtttggggagaattaactcacaccaccctaatggtcgctagtccacgcatgcctcatcgtaatcatttgttgcatgtctaccccctgaaaggccctgtgctaaatcttgtgattgtcaagatgaaacaccagtttcacagtgtgacaggatccgaggcaggacctaagttagcatatatcaactcagaggtgactgagtatttctcaaaatcagagctcttaaaattatagtctacaatgaaaaatagatacatcctcacactggactcatatattaaacataaatatgttgtcatccaaccaacactcagatggaaaaaaaacttagacaaattaaaatgattctttctgtttgtattatgctgaaatatttcctttcctagttcatgtaattaaaaaagactcatgtgaccaactaaactgataatgggccatgatttacaaaatagcagtacaggagactgtgggtagctcagtgtgtaagaaaataacgaataaaactgtaacaatacactatactggaaagaaagcaaaaagacaatgttaaaacaatctgtaatgccccagctgagttacctcatgaaatatatttcctacaagaaaatttcctaccaaaaaatagtacattctattacctggaggtgttaagaactaatgaagaacaacttcataaaaggtacttgtaacgtgagttttctctggcccagctagatccttccgcccttctctgccccaaagaaacacacggacactatattggtataaagctgttggctgtgggctatggtttcttattggctagctctgtcttaattactaaccaatttctataaatctaagtacttccacgtgaccttatctactggagaaaaggcccgggtctcttactccattagggtctacatggagtctgttcagcgtctcggcagaggagagagagaggagagcgatttcctgtttgtctctgcttatattctgattcttcccagctacatcacttcctgcctggctagtcagtcagtcagtgttttattcattaagagaaacatatacacagaaggacttcccccatcatgtactaattggtgggcagtaaattgaagaccttgattatgtggcaagaagtggtaaagagaaaaaatggaatgtgaatttcttgacggtcttctgttttacttccatccacatttgcactctgtacaaagtacaaaaacaagtggaaggagacacaaatatctgctggagttagatgactttttcagagatttaaatcttgcagagaaaagtctgagaaacaagtatatggactgttaaacacagtcagagactagttggtaaacttttccatgaaggcttaagatgttggtgctttgactatatcatttgttttctctcggatttgtctgcctggtcacctctacgatccctggcatgcccgaggaagcttgtgttgcttggctcctatacaaggagggggatcatttctcctttttttttgttttttcaagacagggtttctctgtatagccttggctgtcctagaacttgctctgtagaccaggctggcctcgaaatcacagagagaagcctgctcctggcatcaccaatctacttcaaaaaaaaaaaaaaagattatgggtgtcaaagaacctccaaatggagtttgctttctttgtggcaaaagctagccatttgggtaagaaactgcccttgcctagactgctaacagtatggtgtccaaacttgacaagcaggatacaaaagaaagccactaccgaactttgcaaagacagggtaggacagtccttcaaaaattcctgcttcatagaagagtctgtcagatcttccagacttgtaggcaaaagatggatgctccaatgttacagagaaaccttgggtcactgttcaggaagccagaagtctgtcactttttagcttttgatgttacttgctccccacttgcaggatctcatcatggagctatttgtctgtgagattctgttgtttctaaatccaaggtgatgggagtcttttagatgcctttgtgggggacagggtctgtaacagtatataataaaacctgagcagaatgtatctcaactgcttttacttttataccttcacccttgaagagagatgaaagaaaggagtggaagagaggaaaagagagagagagagaggtactgatggggaatgtacttctgtgtgtgttcatcttattgattgttgaataaagtactgtttggccaatgagacagcaagttaggcgggactaggagttgaggtggattctgggaaatgtagtaagaagtggtcatccaggcaggagatgacatagcaaggagactcatatttaaggaaggacaagcaggaagtgaccccttttcccctccactcttcctccaccggtgcgatgtgatccactggcaagggaggacgctaatggaagttgtccaataagataagtcttataaaatatatagatttatgataattaagactgagatagcagatgagagatcctagtcattggctaagcagcatttgtacctaatacaagtctctctgtgcattaattgggaccctgactcgggccggcgactggagtaaagagtacacgtggtggtggggcttggtggcttttggtggaaagatttattgtaacaaggtaccattggagtttaaatagatactccatgagtaatttatctctacacatagaataaagaaggtagatgactcaaaggaggcagatgaaaaatgactgcagaagcccagggaggtggcacagtggggacaagtgctttctgtgcaaacaggatgatctgaatttggatcctcagcaaccatagaaaaccaaggcaaggttgcatggttggaacctcagttaagagaggtagagacaaagagatcctggcagctcaccagccagttagtctagcacaaaagccgggctccagattcaatgacagattctgtctagcttcaggttgagtgagagttcctgtctcaagatggagaaagatagagaaggacatcagacatccttctctggacttcgcatttgtgtacagtatgtatataggcatacatgtgtgcaacccccttgtgcaatacatgtgtacgcacatgagcatacacacacacacacacacacacacacacacacacacacacacacacacacaggaaggcagagatgtcaagctttgatattgctttaggttaccctttgaagtcagtgctttttggggaaaacagtttctgagttacagaaacagcggtgttggtgttatgcactagattaaaagtttttgccagtcaaatactctaccttcaagaacagagacacacaaaggggctgcagaacagctgcatctgtatgcagaggcaagcaggatctagctaatactgaacggttgacgaggcaacgaaggagccaaagacatggaccactttgttctcattttctgtgcagtggttaatgccattccttgtcctggacatgttctcagtcaatcctgtaagtcatctatcctggatcaccaagtctcagttgctgaaaactctagtctaaaactgctcaccttctccaatctacttcctatatggttgtaaattattcttcaaaaatacaaacccgggggcactcctgcctcatgattcttttgcttccccactggacaaaagcctcaagttctgaacatggcatgatatctagcccttcctattgttctgggtcccaacttctgtcttcatatcagcctgtgtaactctggcctagctaggcacccctccctgcctcttgctcatcctcctgtccctctgacaaacctggtatttatcatgtctcagcttacatgctgttctctcagtaatgcatttcttgtctccctgacagttccttctacaaacttccagggaaacaatgaccaatcgtgccacaagtctttccaactgtttctagtctatcttcacacagaaaagaaaggcgagggtttgttgttaattcctaacatttttcatttcccttctgattaaatgctgtgtgacaagacatttcctggggagatgcaacacacagatctactcattgcagagagggaactcatgacagacctaagtctgtatactaccaaagcccaggttggtgatcgatctggtgggttctattggggttacctacagagttatgggtaatggattacttagaggagcagaagtgactcaaagacagctgtatcaccaaagcccaccccaacatgggggagagctcaggaagctgaaagcttggaacttagcaggcagctccagcaggcagctcagcaggttggagattgtcctttcaaggttcctgagttggtctaaatctcctctaggcagttcagctggtttctgcctcttccaggcagctggtctggtctgagtctttgtagactttctactctcagagtcttctttgcagttcagcgtcacttcatctgcgagggactctcaactccccttgctcaccctgcagggagcagcttagtcaatctccttggaggatggactatttcaatctcagggggagactgttaacatattaaacaaacacttgttaggctcctaaatagatgaccctttgaaaacacaactctgaataggacagatgcgatctttacccccaccccactcccaccactaccacaccccatcaagtgtacagccacagttgagaaagtcctttgtgatctactgagggtcacttgagacctaagtgaggagcaaggtactatgggaaagagtttggatgggatgaaggatggggaaatgttaccatgaaaggaaactgtaaaacgctgaaggtaagacagagcttggtgggattatggaagaaaaagtgctgcagatctcacagtgtccaacaggaaggtgaagaggaaaatgtcatgataatgagtaagaggaggaggaggtcatgacttcacttacaccgactaccgtatttaaactcttaatataacttgtcaaaaaaatataacatattcatagtatatggatgcaatatttttatatgtatgtgtcttagttaggatttcaattgctgtgaagcaacactatgacctcagcaactcttatagagaaaaacatttaattgaggctcacttacagttcagagttttaattcattatcatcatggtgggaagcatggcggcatgcctgtagactggggctggagaaggagctgagagttctacatcttgattcacgggcaacaggaagtgaaatatgtcactgggtgtagcctgagcatcggagacctcaaagcccacccccacagtgacgtacttcctccaacaagtccatacctagtccaacaaagccacacctcctaagagtgccactccctaggggccattttcttccaaaccaccacagtatgtacaatgtggacagattaagctaataaactaagtaatgtagatatcatctgatacattctaatttattcgtggtgaggacactaaattttcgtcctagccatttttaactagagtcaccacagtagacaataggtcttctgaatttattttcttgtccaactgaaactttgtatccttgcccaatgctgatctccccatttcaacaccctcccatcacaccatttatttcttatatttcttaatcaattgtgcccagaattcttttattttctttcttcatttccttttttttttgtttctttgtttgctacagggtttctctttgtagtcttggctgtcctggaactcactctgtagaccacactggccttgatccacctgcctctgcctcctgagtgctgagattaaagcaagcaccacccttgcctggctcagaattattttcaatctcaagtctttgggttataatgcctcctttccaaatggcaacagtctagcaacatgtctgaactactctgtctctcaaaaaggtcacattagttgaaggaaatgacttatattcaaattgcaattgcttgttgtatcacatagatgctattgaaattcccttggttgttttaaataaaatattttgtggattatactggtatatagttagttccaatattaggactctgatgtaaaactactcccagacctctttttataaatgttaaaaattcaacataataagaagcttaaagcttaggtttttgtagataaagttttgtgtgctgaaaatactacacatgctcagattcctcagtaatacgctgctctgcctgagacagataagtagtcagcattcatgctgtccccggaagaagagtacacagaagttaagtgacaagtgactacacagcaatgtgtcagaatcaggatttacaactttcagttctaaatacctgatcctttcaagtcaaattctgcttttccagcaatagatatcaactatattatatgtctgaactgtaagattgaatgtattagagaattctgtttactgttaactagaaccctagaaaacaaaatttcagaagcatatgaatattaaaactataatctttttacaaatagaaaaaaacagcttaaactaactgagcaggcaaagcaattttgttctttaatgacaatccacagctgtttgaaataatcatctcaataatcaatgatgtatggggacttacctaacatgtattttaagggatgtcttgttttgaacaatcatgttaaaccctagtaaactgaagaattaattagtgtgtatagaggctcagcaaactaaagctttagtctgtcaaaccatctgctcaggaccacccttctcagatcttggcattgttgaggatgggagagacagcacttttgatgctgatgctggtagacaggttgctcctggatatttaaccatcccatctttccaaaggcatggcaagaaacaagctttataaaagtcctggccccgctggacttacagtccagccacagggtgaagccaaattttacaagccagggccaggagtgttgtacctttcaagtaagtgctgggaaggttctacaaaaaaaaatccaagaattctcctatctagattgtgtcttgaagtttcattttggaattttcatttgcactgttttatatattcaaagtcagcctgaacaacttagtgtgtcacaaaagttagtgttttcaaagggtgagaagttgcagttcagttgcagagcaccttgtggtatatgtgaggtcttgggttcgattcccaagaaagggggacgatttgaaaaagcatgtggctttgtaaggtgattattgtatttgaatatgagttggtttaaaaaaagaagaaggaaagaaaagacaagacatctgctcttaagccaagttcacaggctgggggtgtctcagtgaaagagcatgtacttagcaggttcaggccccagagtcaatcatcctcaccaaaccaaaaacgcagcatatttaccaattgaagtataaacctgttattcatttcctctcagcactagtgttttccttttgcaatgactgaacactcacttccctcaggctcttttctttatctattctcagttcactaagccctaagaaagtacacaacttggaccagaccttggctgacacattttatcaccatgactacaaccattggttcagagagaagccccagacccaagtagggctaatgagattcaactctagaccttggcttcaatactgggaaggaagggttttgttttcttttggggtcatcaagaatgtaaaactgtaatcactgagacatcagatgaggaaatcaagctaagtaaggaagagacaaaagataatcttgatggtggtgttttggtagctagatgcggcttagcctgaagccacatccctggaattttcagttatatgagccaaaaaaattcatttctggatttatctccactttaacgtgtttccatatatgtaggttcagtcaagaaaaaaaactactaggaagaggtaccaggtactatgtatgtatacatagtatgccttatatcatgcctgcttaccttgccatttttatcttgctaccattaataatctgcatgttttatgttttgttatcatagctacacaaagtattttcaattttggatttcttttacaattctgaagacttagtgataagactggagaagaagagatagtgaatctttatgatatccttcattggtgacttcttaagtttggaatgtaatgattatgaataagagatacccaaagtcggcgactttacctcagaggcgaagagaaccttttctaaggaaaatcagccctgatctctcttgtttttctgtcttcctgcctgtcttttgcctcacaggtcagcagtctttgaccggatatgccctgggtatcataaaagacactccttgtctgtgacagcccagccccgtgaagccattataggctgctcttccttaaaatcggatcaatacatctgtttcccagagggtagagaaagaacaaacaccaagtcctgataaaccttcactgacatccttcacttcctcaagcgctatcctcggcatacagttagtactccagtcctttgctattaataagtccctctcggggagaagctaaaagctctaattttatccagatgcaggcagtgtgcagaaccaagccactcgccccatcattctagcagaaagaagtgtgctgaaagcgtggcgtgactcactgccgtgtcgaacgttcctccctgtcctccacctgaaaccaggtttggagcagaagccccccaatccccccacctgccccaccgccccagccccaccccgcaattgacttctcagttactgtagatcatactatggctctgtgatgtacaacctctgctcacagagaaaggcagttacagatgaattcactcaggagttcagtaccgcatccttaaagttcctcagaggcaaatcacaatgaggcttgctgcaaactcaaaggatttgtaaacaagttctgtgctgcctgcgaggagacagctccattcctggaacttctgcttgcagagtcaagaacgcattattctttcaggcccaacggagagaatgaacagcaggcaacctcttagaagctgagctgaatcttcagacacagccatgtcctgcctgggattgccatctgtttctttctctgctagaagcccactcatcaggtccctggttgctcagagaaattggcccctctatcttttctctctttgctcctctacacagtggtgttctggatagtgagtgctcccgagaggcaatagtataaaatgactctagtaagaatccaagagtactattctggaacttttgtgattgaaggaaaaaaaatttccactatcaaaaagtttgtatatgaagagcttaactatcttcaccagacctctcttcttgatggtaaacttcaatagccaaatacatgtctaggagaaaagtaagggtggtggtacacttgagtgacagacaacttgcctagcattcacaaggccctacgttggttcctaacacacacacacacacacacacacacacacacacacacacacaccctcggggaataagaaaggaaggaaggagctggggaaatgactcagtgagtaaagctcttgtgtggttcaaatccccagcacccacataaaaatctaggtgtggctgtgcttgctgtgatcccaacactgagaggcagagacaggaagatccccagggctcgatggccaggctgtctagtaaactgatgaactcagagagaccccgtatcaaataataagatggacaacaatagcagaagttacccaatgttgatctctatgaatacatgagaagaaaaggaagagaggtgggagacagcaagggaaggagagaggaagaattgttggctatttgcaacttgtccgaagtttgaaaggggctaaattttctagaacaccctcctcccaattataaaagttctactaaaaggatggttgttaaggaacacatggcttggtcaaagccgtgtctccttcattttaaataacatcctctaagatctttagaagaaatgtatacatatgacacaaatatttggtcaagttttcatttgccattgtataattttcaacatggaggaatattctaaaatgtatggacagtattcacaaatcatgtaaatcaaacatgagacctttgctttcgatgttaagtcaccacacagagtgactaatttttccaagttggttagaagaaggtagaactctgagtcagtgagtggctcgccctgatgaatagaaataaaacttatgcttcttccagatggactgtattttatttttaaaatatttattaaggcttattagtcttgtgcctgaattttgttaatagatcttctccatatgtgttttaactcttcagagcgctatagtgtttagacatgaacagtctaatattgagtcataggcatggaatggacttggacagctgatacacataataatctaattaattcagaaccatagatgtgccactatcttctattgccattcttgaaaaccattctagtatttaacacaaattttaggtttagagactagttctgaaccatttgtttaaataccatctaccatgctatcaatgcagtaataagatcatcgtgtgcctattgttcagcccttgtcaaatgtcacacataacagatcttactccatgtcaggaaagagtcttcttagagatggcaacaaatagataaacaatcttaattatcagttaacatcaattaatatcgcggcaaatattgaaatgagtctcaagaatgtcgaaggaagtcagtgacctgtctgtgactttgagattatataaatatacatacacacatacaagataatctccatgtctattccatgtctatgaattaatatgagatggttcatatataaaaactgcatgatatcgaagagtcaaatcatacaatatgcccatcaccatctagaggccatgacgactaaagaaagaaacacacttttacctcctaggatgtgcacttagatgtggccttgttaatagatgtgatcctggagtttcacactaatggctttccagaagtaatatgtactgactaaaaaaattatggggctggagagattgctcagcagttaagagtaatgactgctcttccagaggactggggttcaatcccagcacccacatggcagctcacaactgtccctccaacagacatacatgaaagcaaaaataccaacgcatataaaataaaagtaaataaatttaaaaagtacaaggctctagttttaatttttttaacattttaatttattcattgtgtgtgtatatatatggtggtttgagcatgccttggcactcccgtggaaaccagactacaacctgcaagggtcagttctcttccactatgtgggtcctggtgtgaaagtcaagtcaccagacttggaggcaggggcctttacctgctgagccatcttgccaactccaaggttctggttttaaagaagaatgatttatgatcaagagaggaagtaaggcctgtgaagtaaacctcttaattcaaaaagcaaacaatagattattagtagtatcatgttaaggctaacagtacagtcacagttcctccaagaggaggaggtgcaaagaaagagatgctaaaattctttagagactcttgttcacagcaaaattatacagcagccaaaagcttgaacacatacgatgaacaagtccacagggatctgaacacaacggaatcagagagaatattaaagtcacatgttgggagccatacagcatgaacctttaggccaaacttggcaagccacacagttatagacctgtcttttgattataaatggcttctagaagcatgagcacccaaaaggaacaacatgacccagacgtcaattctttgttccaactacaagcccacttacttaggtaaccctccctcaccccacaacccatgaactttttaccctgtcaacatcctctttctatagtttttttggggggattcagttctctctttcctcttctcagggatcaaattggttggcatcaggcacctatacctgctgagccatctcactagcccgaaagtaataattttttaaactacaatacttattgaatgcttaattctttaggagcagaataaaaataaattcatatcatctcctctgcatgcaaatatctggaaaacacagtttggagagatggctgagtggttaaaagcacttactacatttgcagaggacccaggctccttctcagcacccaggtgggcagctctcaacagcctgaaactctagctccaggggatctctttctagcctcgtaggacacctgtactcatgtacacacacacacacacacacacacacacacacacacacacacacacacaaataagctacttatagtagcatgcaccttaaatccagcacttgggaggcagcagtaggcaaatctatgtatcttcaagaccatcctgggctacatagtaagttctaggccagccaggactacatagtgaaacactgtctcaaataaataaatgagtaattaaataaataagataaatcttaaaagaatgaaaaaaactcctacatctacctcctacttgatattttataaggtattagagggagtatattttccagagtctctattaaacagacatagacagatatttggtaaagttgattgcatctctgagtctttatcttttaaagttattggatactattggtctctctggacctttatataaatggtaaacttttaaatactggaaaccatgttcatttttagattcattttccctagtagagactagtaatgcattagcttctaggaacaaacttctatattcaatgatacaaaatggaagcagagccaggtagtggtggtgcatgcctttaataccaacattgtggaggcagaggccagtggatttctgtgagttcaaggccagcctgctctacagagtgaattccaggacaggctccaaagctacacagagaagccctgtctcagaaaacaaaaacaaacaaaaaatccaaatggaagcagttaaaaacttgggatttacatgttcttttatgtttggtttataaagtgcttgtatttgtaatctttgtattttgcaatagttatttacttgatgtttatagatctgtttttttttttaaacccaaggaacagaatctcattcagtatattcacaatgatgtgaatgcctgtaataactttgaaaagtgtctcagaaaatctggcagtgacctctatcttcatgagaattgtgtatgtatttaatgaagatgattatatactgtaatcaatcttttggtcacaccaatttgtgtgtcttcacactcatcctatatgacctgtatatagtacaccaaacttagaggtatgaccttgaatttaacttataaaaaactaggtcaataaaatttaaactgtttaacaacaacaatgaaatgaaagacaccacctagaatacatctttgtgggcttagctgttaacagtaggtgcttctatgtgagtagtccttatgggattgttgccctgtctttgtttggcctcctaaattctgaagaaaagtcacactgaaatgatcagaatatttactgctaaattatatatacatacatacattctacgtatgtacaagctttatagaacccagaacatctgatggcctcccaaataaggtgggcctttgtaacacgaataaataaatgacccagagactaatattggggttcaagcttcaagctgaatatctgaaaagcaaagcggctggccccttgcttcttacctctacctcaggctaaatgggctcatcctgtcttcatgagctctcaccaagcctcaggctataacctttcctcagcatggctggagaacaaacgcctctctcagaccttgcttctgtcttatatacttccctaatgttgggattaaaggcatgagctataattctcttttagactaattcattcttgtgtgtatctgggtggcctcggactcacagagatcggtctacctcttagtactaagtcctaggattaaaagtgtgtaccaccacctcctaccttctggctgctgggattaaaggtgcttgtgactgactttgcttttctgaatcctcagtcaggctttaataaatcataagcaatatatatatcactacaagagttagcttgtagcaaattaatatgttcatctaaagaattatagaaatttacaggttcctggtgatgtctggtcaaagatggggtggaaaagacatgccctggatggggaagactctgctgagtcttcctcccctggtcccacagagttgccttccctccccataggagctcttttgtactcttgagttccccaagaggacagtcttttctggtgagggaatggtagtctctccatcctctctgggggctggtttgaacaagctggatttcttcccatcaactcttgtttcacaaggattggattttgtgcagtacatgtacaaacgtgggtctggtgacatcctccacttcttgtactcagaatttatattttcttaggtgtccagacccggggacgtttagaaggagagagatatgttcgatgagatgaccacggattttttgatagcaaagagagagattattgtggatagaagatcctgtctctgtggtctttcaatttctcatcaaacaagtttcagattttctttgcccaaagacccaagcttttggggaaaggatatacaggaaataagttgatgtcagctggggaagagaattttgtcttcaccgtgtgaagccatgtggaggcccatgaggaggtagacgtctaaaggaagagtgggagtgttaagcagttgtgatttggagtggaggtagcaagtgtgggaagaggaggaaatgacagtgctcagttgagcggtgggcctaacaatctggcagcaaactgggagctaacaaggcccacctggagtgcttagtgacaaaagaaacatttgtagctcaccaagaacatctaattgaggagaaaataatcgatgtttggctaccagcagactcatgctgtatcttggacccagcttctttcggaattttgaaatgagcaggaagtgactgacaggtttgtgcttctgggttggaaactttttggggggctggggtgatatttcagcactcatgccagcattcaggttatctgcactgtggagactgccttttctcttgtgtttcgtaatttgagacatttcattactatgtggcttattaaaaatgctccatttttttattctttgattaagttcttggcacagacatacttttttggagctaatcatagatgtgtgccttttaacttcttattttcaatctttttcatgaaagttcaactttgctttttttttttctgtatactttataaaacctgtcttccctgtttagtcataagagattcattcaccttagagattccagtattcatttttaaaaaaaaagcctacagtccatctgttaccatcttctccgataaatttattaccctttgtggtttcctcaagtttctggcagaggagactcttctcttgcaagcccacttatatcatatggcaagaagtgcatcaattttgtgccggttttgctgaagtcaaatcatgaaatatgtccagaaatgtttacatttgctacttgtttgtgctgctggtatactgtggaagggggtgaagaagtagattacagatatgaagacctggaagttgaaatgccgcctgagttttgtattgcactacaacaaatggccaccagcagtggattaaaacttcatgctttattgtcccaggcttctggaactcagcagtccaggaataggttagctgactcctcatttaagggtctcacaaggctgacagcaacaaaacattcctccctgcaattctactctcaagcccatacggcagctggcagaattcaattccttgtagctaacagactgaagtccccgttctcttgctggctgtcaactgggctagtctggaccccttacaggccacaaacacgtccttgcccagggtccactctcacagtctgacagtttgtttctcgggttattatctattctgatgagtaagtcatagttcatctaattctgtcacctctgtaacactgagagatgatggagcccaacacattgagcatcaaggagatgtatcttcatctcactctgcagtcaagtcagaggagaatcaggaacttaaccattcagtttgctatggactcaacggtgtttccacccaattcatatgaggaactgtaatctctattgtgactgtatttagagatagagtctgtaagaggtagctaaggtaaaatagggttgtaagtgtgggtctttaatatcattggattggtgttctaataagaaaagacatcagagagacagtgcccctttctttttgtgtccacaacaagaaagcaaccacctgaaagccaaaaacaaacaaacaaacaaacaaacaaacaaacaaagagttttcatcagaaacaagggcttgacactaccccatcttgggtatgtagtctctagaggtgtgagaaaataaatttctgagaagtgacccagttcatgtattatgttatggcggctcacaaggacacatgaaaatcagagtcaaccagtagctgaaaggcatgtctttctcttgtgctcttgcttggatggatagaccatggctaccattccttggaggtcatatgaactatgaagtctatcagcatgatgctgtgcccttttcaaaaccccagaaagtgggtttgaaaagtggttgttgaggataatgccaggcccaataccaaaggtgaggaagaatggaaacattttggtccttgatatagcccatggatgccctttgatggccctctaattcccactttacgattttctccatgccatcatatttggtggctttctccaagcagaaaaccagatccctgacagacatggaaaaccataccactgagcttatcattgagctcctggatgcccttggaagcccatagtagacaccaaaagaacgttttgggccccatagctgtcacattacagtttcccaaagggattgtctacaaccttctgagtggtggtgatgtcatggattatggtaaagaatacttctgtaatgtcagaattgtcatggataactttgcccagagcgctaagcagttggtggtgcaggagtcattgatcatctcttgagcaagactgccctccttctcagggtttatgcccctcagaaggggcagagacaatggtccttcagctccacccttcagatgaggccctgcctgccttctccaagctagtaaggatactctcagtcttcccaatgtacttggcactatcatcaccctccatgtttttagtggggtatgctagctagttttatatcaacttgacacagctatagtcatctgagaggagggagcctcaattgaaaaaaaatgccttcaaaagatctggctgcagaaagcctgtaggccattttcttaattagtgggggagggcccagtctattgtgggtcctgagatctataagaaagcaggctagcaagccatagagaacaagcagtaagcaacacccctccattccctctgcatcagctcctgcctccaggttcctgtcctctttgagttcctgtcctgacgttcttcaatgatgaacagtgatgtggaagtgtaagctaaacaaaacccttccacccacaacttgcttttggttatagagatttataacagtggtaactctgactcagacatggactctcaatcctgggagaggaagatggccttccccttaatggcaagcttcttgttctttgcctcagctgtggcatggactagttgtgagtggaatcacactgagacatgaagaccatgcagctgagatcaaagggagaatgcactgatagcaacaatgtcctttttgctgaggtataaagcgtgtttggtgaccaggtgctccatacagacaaaccctttcactcctgcttcagcatcatgccttagggatgcagctggtactgcaggatatggtggagctgtctgccaaatggggaggagtaaaagctaaaatggattttcgaacagaaaaatataactgaaataagagtcagttgatgagctcgacaatgagacagaggagacaggaaggaggcagtgaacccgaatgtgaaccacagaaatgaaccaacatggtctgaaaagaaaacataatgaaaaatttaaatgaacaaagcctcagggacctgtgaaatcaggaggaaacacacagtatttatgcagtttgagttgggaagaaaaagaaatagagataaggcagaaaacattctacaagaaataatgcctgaaaaatctcccaaacttagtaaaagacataaacctacatgctggggaagctgaaaattccagactgaataaatgtgtacatatataagtgaatgtgtattttttcctgatgtatttgctgataagtaaatgttctcttgagtaatagaacttatagaatgagtctctctatatacatatagaaaggggatttgttagaatgacttacaggttgtggtccagctaatccaatcatggctgcctatgtatggaaggtccaagaaactagtagtaattaattgttcagtccacaaggctggatatctcagttggcctttagtattcacaagaatcctgaagaaggaagctctaatgccaatgaaggaatggacttgctagcaagcaggcaaagagcaaaactttccttctttcatgtccttaatataagcttctatcagaaatcatagcttagattaaagacgtgtcttccctcctcaaagatctggattagaagtggattgtcccacttaaaattaagcaaaagttcctcacaggtgtgtccctccattttggggtttctgttaattccagatgtagtcaaactggtagacaagaatcaccatcactggtgctctgttttcatcttggtttgtttttaaatgaaaccaatttaagagccactagttcaggaaaagaatatttgtgtattggtattggtgccttcaacaaatttctgaacttctttgtccatacttctaggctggaataattatgatcactacaaatatgaactgggcttttctaaaagtcgaacaaggcaacatgtgaaaccctgaccctctccctggcaaagaataaagatctggttaacattcatttctttctttccctcctgctttcctttcactttgtaacacatttgtttacagacccttataattattttacagggtcagttcagtctgtgatgtttccccctttctttttgatggtaccatatttcaagatatcatattcaagatacagtagtcttaatggagattgtttctaccattgaagcagatgagggggatctatcttttcttggggtgctgaatggcaattaagcaattttaaagcaccatttaagtcagataaaattgctatgtcaacaaattctttattctcttgttggaggaactcctgatgttcagaaggctgcaaagagatgaggagaaactgcacttactggtcattggaagagttccagacagctagcagatctttggggcaagccaggcctgatcattgtaactgcagttaagggctaaagaatcacaatactgtgactgcataaaacagtggttctcaatcggtgggtagtgacctctttgggggccaaataacctttcacagaggttggttaagaccattgaaaacacagagatttacatttttattatcaacagcagcaacattacagttatgaagtagcaacaaaaataattttatggttgggggccaccacaacatgaagaactgtattaaagggtcacagcattaggaaggttgagaatccctagcctagtcactgtaatgctagctggtaccaagggctaaggaatccaaataccatggtctatcttcggctgtaacatctgtaaaggtttatactctaggcttacacaagagctgtaacaccagagggtgctgtctgtcctcactacttaactaagcactgagggataccattgcttcccgccctgaagagcttcttcttggccaggtagtgttaaaggatcccagccagatgactggtaactccattatgaactttcttgggaaggatgtgcttatgtttttcaagataatgactcttagcctaggtagtaaaaatcccatgggtaataggaattaaatctctgtagaaattcatacgtaaaatccaagtaagaaaaaaaatgtctacactaagcctttaatgtctgttgtgccataaaatatggaaactatcaagagctaaagaggtcctatctaaaagaaacacacatataataagataaatatatttctgctggcctcaggtgccacagaagaggcatcagaaagaatatgagaaggtggcagcagagacagtacttttaatctctgaaattcctcccaaaacataaagaacatctaggatagcaaacacaagacccagcgatgacctctgcacaaacatcgaccttcacactagaaaaatgtgtgtgtgtgtgtgtgtgtgtgtgtgtgtgtgtgtgtgtgtgtgtgtgtgtgtgtaagaaaatggtccccatagagagtgaaactattgttggagtaggtgtaccttgttggaggaagtgggggtgggctttgagttctcctatgatcaagctatgcccagtatcacaattcacttccctgttggctgcagatcaagacctggaattatcagctccttctccagcaccgtgtctgcctgcatgctgccatgtcctgccatgataatgaactaaacctctgaaacttgaatataccccaattaaatattttcctttttaagggtcactatggtcctggcttctcttcacagcaatagaaaccctaactaagacagaagttggtaccagggactggggtattgttgcgataggcctgtcctgcttttgtttgaaggaatatggaagtgggggggaggactatggattagaaaagcagttacacaaatgctttaagtggggtttaatgggccatactagtaggagcatggaagacagtggtgctgagtgtgattttggctcaagagatttcagaggagaagaattttagtatgttatctagagatcgttcttgtgatattttggtgaaaaaatgtggctgctttttgcccttgtctaaaaagtctgcctgaggctaaattggagagttttggattaattctgctgtcagaggaaatctcaaaacaggctagtatagactctgctgtgtggttattagtgataactacaatgaacacataatgaaaaggagcaagctgaacaaggaaaaatgtcagtttcatttctatatgctagcaacaaataactagaaagtcaaatttataaataagtactatttaaggtggcttaaaaatagttaagaataaaattaagaaatatgtaagacttgaacattgaaaactaaaaattatttgaaaaatccctaattagtggtaagataatgctgtcttggtctatttttgagctcatatagcagcatatttgaaactgcatagtttataaagatgggagagttatttcttgtagtttagaggttaggtattccaaagtcaagggacctgtatttaggaagggtcttgatatgacagtggcacatggtggaaagctgagaggtaagggtacataaaaaagagagggggactgaactcatcccgtttatcaggaattcagttccatgtgctggggatggaaccgagggccacatgtatatcagacaagtgctctactactaagctatgtcccagcctgatttgagggatccagccaggtccattatcactgttaaattagatgtcaaatttggaactcaccagcttcaaactttttaatagtacaaagcatatgtcatgatcatggattggaaatgttaatgctttaaagatattgattttctactcatttattttgagattctgtgcaggagtaataaagatactagtggttgtgtatgtgtgttcatgcacgtgtatctgtgtataaactaacataagattctaaagtttttatggaaatgaaaataatctagaatagtcagaataattttgaagagcggcaatgtttgaaaacttacaactacttgattttgagacttatcataaaattcttgtaatcaacagtgtatgatgagcacataagcatggatggccatctgaatcaatgaaattagagactccagaatagatccatgtacaagagtacacatttatgtgtgtgtgtgtgtgtgtgtgagagagagagagagagagagggggggggaagaagagggacacaagatctaaggataatgggataactggatatccatatatgacaaaaataaacaagcctcctccaacatgtggccgtgaacaccttttaaagtctatcaggcctttacagggctggatgacaagcatccacagtgacagaatagtcatctttatttgtagtactgaatgagtactgggaatattcccacagagacacctagaaatcatagggcatttctcagctcagtcaagttgacacataaaatgtatccttttactgacataaatattagtgttttcttgctttttggggtgacaaacaagtcttactacacgtttctccataatttcacacagaggagctgagactcaatcacaaatcacagtgcttaatttttttcccattaattttgctgtattatatttttattcacagacttgtctagaagaaaattaataatctcaggtgttttttcataataccctgatgaagtttgtgagcaagtgacctcaaaagacatttcattccctgtttttctattattcaatgttgtatagtggtttccattgaaatgaaaacctttgcatctcagagggagacttaagacacaggattaaaaagggaagcgaaacaacaggacattttaagacagcaaatttataaggagataaaaaccaaaacaaacaagcaaaacaaaacaaaacaaaaaatctaaacaggatgctctgaggaagatgactactccatcctgcaggtaatctcattaagagaggagctcagaaaagcttccggaagttcctgaaaatgactatgttcaccatgcccttccctcttggagagtataaagacagtaaagaatgctgagatccttctcagatgagtccagctatgtgaaagagcagaaataaagcaaagtccctgagagaaacaaagaccaactgaactgcctagaagagactcacaccatctggcctctattgtcacctgcacacacagcacacatgcatatacacacacatacacctgggaaataaaataagtctttaaaaagctaactatatgtcttcaaacacttagcatttcataatgatacaaacttttaaaaatccttctagttttttgagaaggtacatgaagtacaaatcctaattggtctgagtaataaaaacccagagtcagattgcagggggtaaatgctgaaagatcagagaagtaaaggagccagctaccaaagttcttacttctacaaaatcctcagaccagaaaggctgagctcttgtctcctcccaccttatattcctctctatgctcagccttatcacttcctgtctccatctccccggtgctgggattaaaggcatgtgcctctcaagtcctggaatcaaaggcctgagatcccaagtcctgggatcaaaggtgtgtgccaccactgcctggcctctgtgattaactagcaccaccctttaatattcaggtaagctttatttgttagagaacaaacaaaatatcaccccaggtacagtgaattattgctatctataatcaaatcataatgcaatacaccaggactttttactactgtctgcttgaaacttctcttcttccttctctcttccaggaaccatcaatctgctttcagtttctatgaggtgaacctttttaggctccacataagagtgaggtcatgcagtacttgtgatctgcttgtcttatttaacttaacataatgatttcagctcaatccatgcttcatgaatgtcagaacttcgtaatacaatactattccattttgtatatacatcacattgtcacccatcagttgatggatgtttatgctgcttccacattttgcctattttgaatgagtttcttactcttttgtgtcgtatgttcttatcatggcagccaatattctagtttctatgtgagtaaagagtaaagaagtattaaatatcatgtaattacttaataatttctcttcaggaaaaacactatctctccatcctaaaccagtgaaactgagggactgggaagaagttactcatcaaatggcaaaataatacaaaataaaattcactaataagacaaatataacaatttatctgtaaattgttatactcataaatatgtatatacatatgtgctgcagaattactgtactcaaaatggaatttagcaaaatttatcgtggagttctgaatatacttgtaagaattattaatcaaccttgaaaatgacacattttcctgctatgaaacacaaagtaatagcagaagttctacttccacacgaggaaaggaacaagaaagtcaagcgcatatacctaacagttctaatcttaggtatttatcccaaagaaatgcatatgtttgtgtactaaatgacatttaagtaatctcatagaagcatttttataactacaccacagtgaaagcaacttaaatagccatgcagatagaatgggctttcttttctttgtttttgctttcacatatctatccatccatccatccatccatccatccatccatccatatatctatctattttgtgggtggggttggcacattctatgctacacccatgaatgtcagaggacagtttgtagggattagttctcttcttctaccatgtggactctgggaactgagctcaggtcatcagcttggtgcaagcacctttaccctctggtccatcttacgagatcagttccccctgttaaatatgacatcgtcatacaatgggatattacatggcaatgcgtttgtatcttgaatgtccccaaaggcctgtgtgttgaaggcctggtccccagcctgtcattctattggcatgttggtggaatctttagtaggttaggaggatgggttattgggggtgtttcctaaaagggaattatggactctagtctgtcactgtttctctgttttgcttcttggccaccatgaagtctgtcccttgtctaactctccacagaataaaatccatgaaactgtgagccatcatgaaacatccatccctttatctcaggtattttgttacaaacagaaaaatttaatattgagaaaatgagccagacactaaacacatacgcagcatgtatctacctatacgagtttttttgttttgttctgttttgttttgtttttatgggtaggatcagtggctgatgttagcggttatgactatgattacttttgggaagagagataacagcatggcgtggtatgtgggatcttgctgctttatgttttggcccaggtgataatgtcatgaatacctctgcttttcttcataactttctgaggactcaggctagttgggtttatgttgctatgataaaatacccaagaaaattgagctaaaagagggaaggtgtgtttgaactccgcttcgggtgtggtctctggacctcttgctatgtgcctgtagcagcatagcatagcatatcatcatgataagcatggatgatgaaggccactggcttaccccatggtaggcatgaagcaaagaaaggaaagaggctgtgtagggaggatgttccaatgtccctgcaaggacacatcccatgacctaacgtcctttctctaggtcccacctctgaaaggatataccactgccaggtaacactacagtctggggaccaagcctttaacacatgggttttgaggggacactatagactgaaactataacagcagtatccttagtaatgtagacatcgctcgtccttcggtgctttgcccatctttgtctcctctgctctcctctcgtcttccaaagcctctccttatcttcccttcctctttttgtgtccctctcatactttatcaataaaagcttgttttcttaaattaagagtttaaaacagcattttcaaatgcttaaaaatcgaggcaatgcataactagcaggtaggtcctcactaaggaaaagtggtagcagagttattcaaagtgaggtccacagactgtaaatgcttgttaccagagactgggagtaactgtgcaggacattttgtagcaccaaacagaatgctttttatatgttttgactctaataataaattcacaaagtttgtattgtatatatcctgtatttttagtgtaattttcctagtaaatcaagttggtgtttcttacatatttagtttgtgatgatgaaagaaagacaaccatttcaagagagtttacttgctaaagaaagagtgattcaagacgaacacaagcaataatgtcttatagagcaaggcatggcatggtgacacatgccttaatcatagaaccctgggggcaaaggtaggatgatggtgagttcaagtcagccttggtactaggctatgaatccacagctcacagtttaaatgcttgttcctgacttgtgacacaacttttgaaagttgcagaactttgagaggtggggaaagactggggatagttggctactcgggtgggtccttggatgcatattatgtctagaagcttcttgtcttgttctctgcttcctggtactccatgtaatgaattctgctgctccaccatgccttccctgtcatgataaaatgaatctcctgtaactatgagcaaaaatatacctctccccctttaagctgtccatagtgatgaaaataactaattagctgggctacatgggaaattttaggcaagcctgggctccacaatgagatcctgttttaaaaacaaaacaaaccatggcaatatctttcaaagaagaggaaaagaatcccaggataggcagaacaaatggaaaccatcaacaaatacaataactgaacattgcaatggttatagtaaatgtaaatgagctatatcctcagaagacaggaattgcaagatttcatctttaaaaaattcacacagaatacaagtattcagaaaagcataaggaaaaagacacatcttcagtcagaagaaaggagcagagaatgcatgcatactcagtctgtttctccacacttaccagagaggaaagcaagcacaggagagacaatgatgtgaccaagagacaagctgaacatgagctatatagaaactcacccactagttctgacttaaagggcatagcaagttgttttaccacaaacggttaaagaatatgctcatatgtaataataaaagtatactatataaacacatcaagagcatcagccatagttggtgccatgcttttatttacttacaattttaccctgcagcagacagactccggggcttcatgcatcttaagcagatgtggtgtcaatgtcaatgtgttatatccaaggttatgagtttcacataattgaaggttcagttggtatgtttacactagcaacaccacaaacccatgagtattgtacactgtatgtcaaaaagagagagaaatgcattacagagctacgcgcatgggagaatggatctatttgtatatatgcttgtgtattgatatcatgtaggcatatgtaagaggctatatcagctttgtgtgtgtgttagatagacacccatctttttttgtctttctgaatatcccttttatctttttcaagatcctgacgcttccaacacctaccagtagtgccctcctggagatcaagtctttaatactcatatcagcagtggatatttggcatccatactgtaacagttgtcttcataaatttttaattgaaaatattgcctcagataagtattgcattagatatgtggcaaaatttctaattcctaaaagaggaaaaattagcataacttgtgtgattgtctattatatttttaaattaatttgtgtgtgtgttggggttcaaaaccaggagtgtgtgtgtgtgtgtgtgtgtgtgtgtgtgtgtgtattcacgcatgtgcattttgaggttcaaaaccaggattgtatatgctcagcatgtgctctaccattgagttacatccagccttcaattattttcttatattgtgtcattatgattgtttgcaagaattgcaatatacatctataattgcttaagtcatttactttgtaaatctctgtggcagaaaaatatgtcttctaattggggtgttaggcaacacaaacttttctgctagatactaatgtaatccccatgtcaatcttattcacctctagtaggttttctatttagcctttgcgtttccactacattgcagtatcttgaagctggactttctttgaattgccagttcccaaataatgacatgggactttttattaattatgaaagcttggccttagcttaggcttgttcccagctagcttttaaaacttaacccgttatatttactttttgccacatggctcattaactatcctcaataccaaacgtctgacatcctctgtgtctggctggtgaatccctccaccccaccccagattcttcccgaagttcctatctctgcccagaggttccgactagcctctcctgcctatctactggccattcagcttcctatcaaagcaatcagaaggtgtcttaggcaggtgaggtaaaacagtgatacatcttcaaacagtgtgatcaaataccctgcaacagtatctattgcaacacatgccactgacagttcagaatttgtcttcacagttattagtcatatattaaaaattagtttaactggaaaaagtcatggtgtgaagcatgaaagaaatggagagaaaatacaaaaggtttgagtttgatgtattttattgagatctgttctgagtcagaactgaagggtggacttctgttttgtgacaataaaatacagtgtccttgttttcccaaagtcaagctactcaacatgtaattgggtttaaaaagtgccctgggataaaaattaaagacaggcttctggtcaatatagaagcaacgatgacacaaaggtaagagttcagtgtcagttttaactctgatgctttagggggaaaagcaacgttctgtgaggttcctgagcaatgggggggtctaaaggccggtcttcacaatttaggagagcaattctggaatttgcaatgaaacgaacaacttagtgggatgttgacatctttcctgttgttgcctacagcgtaaggatattcgtttaaaaataactggcacattctagagtgtttattatttagtgtatagtgacttggtttgataaatcatttgtaaattttaattgtctcttcctgtttctaaagttatgatattgtgactttcagaagacattgattgaattcagggcagttctcaaacacaactggagtcaactgctgagtcgatgggatgacaaatggggacactgttaccagtttaatccccatatgggccaattagtttcacattgagaagaactctgttccaaagccacagattgcaccattaaccccagtcagtagtcttcaaattgagtgtcattgatcacaagaggcccaggtttgagtgtcaatggctcagcaaaaacccatcatcacctctgagagtggagtgccctcttacctcctacttcctccttttggatgttatggaaaatatgacagaaagataaagaagttcaatgtctctttgcccttttatacttcctgtatcccactatgtcattataaaagtggaaagccacctttgtatagcttcaatgttttttttttaatggaatctgtgtgctgttgtaaaaacagataatagcattattgattagcaatactaagggaaagcaacaaataatgaatgtattcatttcactgacactaatggtaccttaattttttaacatttacctaatatgtaagaaaaagtcaaatacatattttctagtttctgaaacctgtcacttttagcaagtaaaagttaatattaaaagtagaattatttcacatatgacatctataaaaggcaatgtctaaaacaactgaatgatgcaatgtataaatttgacttccccttgttctcaaaacaagccaaatcttacctaacttattgctatggaaaacactgatatcctgaagtttagactacgacttaaaaaaaattggggtaatctgaggtaaagtgaggtcacattaaagcaatttaaaaataggtagtgatacaaatagtgtcattcttacaagttacttctacaaatccataatagatgttttgatatgaggattcatttagcatacttatcttttagtaataaaacgtaattaagttaatggtaaaactgatgttaacaaaaagctggtttagttcttctttgtaacaaagccaacactcttgaatctttgtgaaccttttgaataaagccaaaaatgtggagaataaaggaacaatgatttgaatgtaatgcctgggaacctgggtgaattccatttgtggttctctcctcaaacaggaactgctatgtgtaggtccagagattagggacattttctaacgtcacaactcatgcttctctttatcatagattgtttatttccacatcctcaacactctcttgcctttaagaatcacccaaacacctgcagtgttttctttctcttctaggagtgcaggagcaaagacagtaaagtcagcccttcttcttgtcttgtgaatgtgggtcccaattgagaaatacaaggggaactggaggtggaaacagctttgcattggtaaaagctagaaaagagagctgactgacattccactagagactcagagaacacaggcggcggctctatgagcaggcctctttgggcagaggggaatagtaacggcctgtgatggagactcccctgcaggaagttttctggggagtgttcttgggataagtacctgggagaagtaaaggaggacagatgatgctcatggtgtcatcaatataaagaccctgctgctccttggaaggccagggcaggtgaggatcgggaagcctgtagatacagcctgaaaaggttgggggaactttcaccttcctccccatagtagtatcattaaaggtagtcaggacagaaactcaaacagggccagaacctggaggtaggagttgatgcagaagccatagagcaccacaggggtgcaacttactggcttgcccatcatagcttgcacagcttgctttcttacagaactcaggaccactggtccaggaatagcatcacctacaatgggctgggcccttcctcatcagtcaccaattaagaaaatgtcttacaggcttgcccacagccctatcttatagaggcattttctcaattgaggtttcttcctctcaaatgactttagctttagtcaagttgacataaacctatggttcacaatattaatgttccatcttggggataaatgagaaagtttctaattgaaaaacaatgtgtttgtgtgtcaagttacaagtggtcagtcatactggctagtgttttatgtcaacttgacacaagctagagtgatcagagaggagggaacctcaactgagaaagttcctccatgaaatccagctataaggcattgtcttaattagtgatcagtgagggagggctcagcccattgtgggtggtgccatccctgggctggtggtcctgtgttctataagaaagcatgttgagcaaatcagggaaagcaagtcagtaagcagcattcctccatggtctctgcttcagctcctgcctccaagttcctgccttgttttagttcttgtcctggcttccttcagtgatgaactacaatgtggaagtgcaagtcaaataaaccattcgcccccccacccccctcaacttgcttgttggttatggcgtttcattgaagcaacaggaaccctaactaagacacgtgctgaaggaactcagatgtaacatacattatcttatgttcaaggaattaaaatgtaaaggttttagccagactttatcctccatacatctagcaaatactgtctcttcatccttcctctttgaaggcatgaatcacgagagatgccgatttttcttctactgcctgctaaatacttcgtatctatacaaatactttgtcattcatattctcccttcttttttttccctattctccacccagtggaatccagggccttgtacatgctagatgagcgtatatccacagcccccagatctcacattagttcttatgctagaggggtacccatgcaccttccctttcatatttatccctttatgtttattcttcccgtgaggctttgctaattctaagaaatgatgcaccttcctcttattttcaatctttcttagctgaatcttttcaagcgactgatccatttgtctcattctcaataataaagaaatatgctctcactgttaataaaaagctgattggttgatagctaggcaggattttcggggcagagagaatgctgggaagaaaggaagggtctgaggagtctctagctatatgcagaagaagctcatagatgaggcaaacgaggagcctcggggcagcacatagattaatagaaatgggttggtttaagttagaagagctagttaaatacaagtctaagctatcggctgagcatttataattaatatcaagtctctgttatttggttatttggggaatggctgccaggaaccagagaaattccacctacaatagcaattactgtattatggagctcaaggtttcagaagcaaactttgattttagcaaaatagtttatcttctccattttacatacacagtgtacatctttctttccaaattttgcctctcaataattttccccacaataagtaataattttcacacaaacacacacatgaacgcacacaatgcattcctgtatccaaggcttatatagctcagcggaatcagtgtctaaatgatcttttctcccagaaaatgtccctttacattttcactcttgattttgtggcatgtgtgtcttggaatctctggaggtaaaatgccacagtgtttaatttgaactttttattttcttaaagcaagaactcatgatgtaaacccggctggcccggaatttgctatgtagaccaggctatgcttgaactcacagaaatccacttgctctgcttcctaaatgctgggataatattaaaccttttaagaaaaaaatattgaggaatcagtcccaggcaagaatctttaaaatatttaataacttcaatgtaaataacaatatatgaaaatagaaaaatttggcacatatttgtcaaacaaaaatacaaatgtagagatattattttaattaattttgtgtctttaacacctgttaacctaaatatgtttattgcgtataatgtaatattctgtatattattcatgtgagcacatatccaaataagagaaaatatttacacaacaggatctactttgttttgaagtgaatataaaaactcatgactttgttttcataatgcaagcagcttagacctagatcacactggctctttgccatatctctgcccagttcaaaacagttgcatctcctaataaccggtattctcttggatctcagttggttttaacacacgaaagcctcaacacccagcataatcctctttgtatttttagccttccccgccctcccccctccacagaaaataggcttagaccatagccactgtgtttcctgtctttcctgggtggatagagcatctttgcccttggtgtactgtgtcatttcatcaggtcagtacttgccacatttctagcagaaaatcaagcatgttttaggaatgtttaccatgtttgcaggaggatattggctcaaaaggagagaggcagagtcagaaacagaagcctctactttttaaaatagggattaaaaaattgaagtttcagttgagagttcaagatgtaaaagagaccttttttttttcctataaggtccttattatgaagaaaaataattcaaaatatgactcagatgctttcatttgtttgggaatataaaatagtggagaaaataccaaacagaaaagatttgtgaggaaggttgggtttaccacccacagtggggaggaattggaggatgcttcttcagctcatgccatggggcttccataacatcaggtagaaagcctgagatataatccctcaaatgaggtgattctgtgggctgggatctaagtccaactttagaatctgtaaataagttgcccaactgctccaatgcagaaaagagaggcagaagaagacagagaatggggagagaaagtcatggcagaaaataattagcctgcagctattttgtatcctgtagtggaccttttggcagagtggagaagacttaaataggctgagcaaacagaagctaagaggtgtttgggaataggcagctgtgttaacacccatgtcatagggaatacaggcagaggggctggttgcaacattcctaagaacccctagacagacagcctgcaatacgggccgtcttgtcatggatgtgcaccatgcaggcacctttgcttgacttaatgcctcgttgtcactatctgggaagtcttaattcttcttcaacaaagggtatggcattttaattttgcacctggctctgcaaatcacctaaatgctccttcatgtcagattgaaagagtgcaaaggtagctaacatgggaccatctggtgaggactgttcagtcctttactcaaactgactttgggatggaggaggcatacaaggtggagaagtaaagaaacagaacctgtctgctttcctttctgtggctattagcctaaagatggctcaaattcagagtttaaattaaaatcacattactaattgagtgtttgcaacttaaaatggacatagttttgtctagtaactaaaggctagatttttgcaaacagatttccttccaccataaacaaacttttccagaatgtttgtatctttctacaatgtcagactttattaatgaacaataaatttgaaaagttaccccccccccccgtttcaatggatttatttcactgagtactcttggttttgacagtcacggccatggcaccttcagtttttccgcccattccactcctaatcactgatgtccacaccagtcagatcacacttcacaggtaacacaaacgccgagaaagggtgaagagtggccacgagagttatctagactttacccttgaacaaaggtggagagctgaggcaaacgtctggtcacttcacagacatcaagtctatgcagggcaggttttctagcagggtcaggctggcttgcagtttcagagtgagcagtgtaaagcagtggggttggactgagataaagccaggcacagagtcataagtttgatggctggagatcttgtaataagcacactggaaggtttggcaaaatgacgtgtggatgggatacgatgccacagtcttaggcattttatgtttcacacgaggagcttttattgatctggcatatttgataaactcaaagcatgatgtttctgatatggtttgataactccatgtgtccatgcactgtagatttaattagaagtgtaagtgctatttttaattagcacaccaagttatcagccttatgattatgctgtgcagctgttggctgttctttgtaagttctgtgtgcccaaaatcttggggcaatacttggtcacccaagttaccaagtaattgtgtcttagtatgtgtactgaagtcaggtgaacttgctgctttataacttaggacaaagcacaagtctgatagctgttttatacaacatgggacaccccagggcagagcacagcccacctccatagatcctactaaaaagaatccattagtatttatttaataaaatagcatacaatttttttttcgagacagtgtttctctgtggctttggaggctgtcctggaactagctcttgtagaccaggctggtcttgaactcacagagatccacctgcctctgcctcctgagtgctgggattaaaggcatgtgccaccactgctcgggacgtagaattaacattggaaaaaataaatatgtgaaccaagttggggtggatttgaacctttccattctgtgcatttttgaattaatagaagaaactttttaaaagagtgaggaaactttctggaacaagactgcatatactgagatggttggagagtctggataacttcccaagtgaaggttagaaatggactgctgttatttctgtgctagttgttgttgcatagttcaatcaagacagaacagactctaaacaccagagatgaacaccacccaagagaagataccatcatgtattaaagccaggctctgggatgtcactatgtatatatttattgcacacagagaccccactgcattaacagaaataattactcctgtgtgcttgttgccttgcaattaaaacgatgaattctagctggaagctctacaagtggttaatgtggctactaagtttctgtgacccaaagagaaatgtctagataatgcttaagttggtagaagatttatctaagagaatgaaaatgtggataaaaatttcatctatacgctagtaacatatgaggaaaacaaatctgtaaagagggaactccccatgatggcttaagtctctcactatcatatgaccctataatagtgacatcatctgtcttcagcattgctcctataggcacatgttaatgctttaagattagaggaaagggtcaaaagacagctcatactggtaaatattgcaacagagtcttctattagctcacagtcagttcatgctgctgcagcaaaatctcagactgggtgacttaaccaacagaaatttattcctcacagtttggaaggctgtgaattcaaaaactgaacttacatctcatgtagtgtctggtaagggcttgcagtttgcaatcttcttgctagagaggaagcaagctctgatgtctcttgttctttcatttttttaatttggtttagcattgttgagacacttcctttatacagtcttggctagcattgattggtgattcccacttctgcctcctaagtgctggaattaccagtatgtaccattatgttgagtgtggtaggtcttcttaggagggcataaatcccattcagaagggggctcactcatgaacttattacctcccaaaggcatcatataatcagcacattgtggttagaattttagcatacaaatgtttggagagggtaaaaattttggtccattacacattacttatcccttgtgttaatgacttttcttgttattgtgatccaatactcaactgctggggaacattatgttaattaggaaaagattattacatttgtttatgctgcggaatattactttaactatgtgaaggtgtgtcacatttgtttaattatgtaaagatgcgttgcatctgtttcaccttgcctgcctaaggcacctgattggtctaataaaaagctgaccagctaataactaggcaggagagggataggcagagctggtaggaagacagaatgaggaggaggaggaggaggaggaaaaatctaggttggagagagaaagagaagacagaagagaagtggagggggggagggatacacccagggccagaagccagtctgcggtcagccagacatagaggagcagcaaagtgttagagggggagggggagggggagaaagagagatagggggaaggggagggtgaaggggagggagagagaggggaaaggggagagagagggagcaccctgaggcaaacattctaatcatagttacagctgttggtgtgcttgctttgtcctttttattctggctaggaacatggcatacggaatggtgctgctcttagttaaagtgggtcttacccccttaattaacccaggctaggaactccctcacatacgtgtccagagggctgtctaggaactccctcacataggtgtccagagggctgtctcctagatgattgtaaatcctgttaataatcaatcatgaccatcacaactcaaccattgtgaatctgacatcaaaacatacactttgaagccatttttctacctcttgacctcataggctcatggttatctcatgatataaaaatgtattaagttcaacttcaaaagtccaacactgctcattgttcgagaaactcctattctgagacagtctctcaactgtgagtccctacattaaaaaaaaagaagatacatacttccaatctacacaaagtaaacatccccattccaaaaagcaggaacggattaggaaggaaatattggaccaaatcgatatcaaaacacaacagagaaaataccacttcttacactttgtgtttagtatctgggaattatgatggctttatctgtatcccatagggcttagatatcccccactgtccagctctgcttcccataacacagagaggctctctcggttcagatctactctttgagtgaaactttcactggtgaacacccaatggtcctggcatcttcagcatccttggatctccattacaactaccttcacagctttacacaatggctccttagagccaagactggcaatcagaactaaccatcacacctaagttatcatcttggaaatccctttattaatcatccatgacactcattagttacttcttgagccatcctcatttcatggcctgccttatggttagagggcttaggtgatttcttactagacaaagtttgtgggagtgatttgtataaaactttctttgagccatcttccatgttttccaaagctcctttgtgagcttaattgacaagtcagagttctactatggaagaaactcaggacataaattcttactggagacttgcctgtcattcacgactttaaaagaataagtaacattgtttgttttgtgactaggtagatttttgtgtccgtctgtggcagcagctattatactgatctgaatataatcacatttatagtaaaataattttggcttgctgaccactcactattttagggtatttaaaaaaaaaaactttaagtggcataagttactgaagtagtagtaattgctacttcacaaatgaaaaagaatgcatcctagaaggattaagcccattacctgagagaaatctggactgacatttgtagcaaactttcttctggccaccaaccaactcccaaatcatgagacacagaaatttagtattagttacaaatgctcaaacttagcttatgcttgtcccattagctcttataaccttaattaacttgcttctcttcttctttgtttttgccttggggctttttacctttctttcattctgtatatcctactctgcctgcctggctggccctggggcctctcctttttttccctccctgtcctctttttgctcctcttcttcctacttattctttctgccaactagtcctgcctatgcctctactgttatggaggtttctcttgtcctgccaggtgccaccaccactttagccccaaataaacacatggacactatattaaattgttggctgatggctagggcttcttattggctagttctctctttactattaacccatactactaatgtatgtatttctacatggccttatcttaccagtgaatgtctggcgtgtcctgttttcacggtctccacatggcatctctttccagtctctccctgcctacctttcccagaattctccttgtttcctagtcccatctatcttcctgcctctactgactattggactatatatacagaaggacatcccccatcactctactgcctaactactggccattcagatttttattagaccaatcagttgtcttaggcaggcaaggtaaaacagcaacacatctttacatagttaaaccaatgcagcttaaacaaaagcaaaacacctttacatagttaatgtttagcaacagacatttacaaatttccaagcacctatgttctttccaatacaccatttgcatctcctcagaaaaacactatataaactgcatactgtaggaagatttatttgtccttttattttttcagtcattaatgtgggttattctgtatattgtgagatgtcttttcacaggatgcttttttaaaaaattcaagcagagaaacaattgttgtttagtttgctttgttacatgatattctggtctgaatgtttaagtctcttcccattccccaatttatatgttgaaattctaatccccatagtgattgtattagcagatgggatctttgaagttaattaaacactaaggttagagcccttaagaatggtatcaggcccttaaaaaaataggcccaagatctacagaatgagagaaaaactttgccagttatgcatacaatagttgattaatacctaggttatatgatgaatgcaaaaaccaaacaataaccaagtcacccaatcatctgcacgctaaatgtgcagattaattgaacagagagctttcgaaagtataaatggccaattaatgcatgaaaaatgttcaatgtccttagctaccaggtaaatgtaattgaggttcatttcactgtggtcagaatggctatcatcaagcaggcaagcgggggctggagagatggctcagtgggcaagaaagagcatctgcttggttaagtatgaaaacccgagttcagatccctagttgcatcctgtggtcttatgtgcttcttactccatcacaaactggggtgaagacatggaatctgctggtagcaagttcagtgaaagcctgtctcaagggaatatggaacatgtacatgccatcccctcaaagaaatcaaactctaccaatgaggggaggtgaagaggggaggtatacacagaaactaggattttctaaaaacagaactactgtatgatccagccttatcacgcctgattgtatgtcatagaaatacctacacatatatatttattgcatcattgttcacaatagccaagacatggaatgtccctggttttctgttagtgaatgaatgaataaaggaaatgtggtgtatgtacacaatggatttttattcagctatacagaacaaacattatatcctttgcaggaaaatgagtgcaactagaaggtattgtgttaagggaaataagcgagactcaaagataggtgctttcttgaatatatgaaaactagattcaaatatatatttgaacattgaaagtaaaggagactcttaggagagggggtagaacaagagaaggtaatgggggaatgactatgaacaaaatacctgttgtgtatgtatgaagatataatgaaatccgctattttgtatgttcattaaaacaacccctcaaacaattgtgatggtgaatttagaataactggttcactattgaaccggatagcagtaaagagcaaagcttacaatgaaataaccttgttaagaaaatgccatttcaaattgggttgtagtgacacacacctttagtcccagcacttgggaggcagaggcaggtggagctctgtttgaggccaggctggtctacagagcaggtttcaggatagccagagtggttacacagagaaatagtgttttgacaccccctccccaaataataataaactaaaggcatgtgaggaaaggagaggggtgaagggggacgagaagagcaggtatgcacgagcaagtacaaggatgtagctaggcgggagagtgcctgtctaagtgttcaaggctcagggtgtatacaacccccaccactgcactggtggtggtagtagggggtaagtgtggtaatttaagaagagtagagcatgcaaaaaaaaaaaaaaaaagatgccgtgcaaaagggttcaagcagagggaaagggatcagaaaaaggggaatggggatggggagacctgagcagcaggagagaggaaagaggggagacaatggaggggaagaacaggtgagagagagagagagagagagagagagagagagagagagagagagagagagagagggaggatgggaggtgggcagggcccttttaaaagggaacttagtgaatgtgcacaggggctgcagctgagggcgtgtcctgtcagaaccccaagggcaggccagtgcagatgcctgaatactaacagtaagagcttggcattattataagtacttctattttaaaaatatttttacttatgcatgtgtctgtatgtggagctgaagttacaggcattgtgacctgtttgacatgagtgtggaagaggagggaagtactctcaaccatgaaaccatctctccatcccctaatgcttttttttaaaagaccattttattaaaaaacaaaagtgtcttgggctgatataaggaagaaaatctcacccatttttgttttatacaacatgaaacccgaaacccattcattttgctaacagctaatgttagacatgtgatacttgtgggaaagtttcctttttggacgaaccgaatagaattacggcttattcatctatacccacgacttttaccaactatggggaaaggagaaaacaggagaaaaaccatgattcctgcttcacaggtctttttctcaggtctttccccagtcaccataattgttttagataatctgtaccagctttggaaaattagtattccatgcaagaccaaacttggtgaagttttgtggtgctgggtattgaacctggaacctagtgcaccctaggaaattatttataactgagctgtatcactagtttagtaattcttcaggggcttacctggtaatgctaagtatcctgttgctcctcaggcagcaactctactatggcaggctcctgtttacctttcccagaattctcatcttctagtcccacctgtcttcctgccttattggcccaacagtgttttattcaataaccaataagacaaacatatacagagggacattccccatcagggtcgtctcaggctaaatggtactgtcagtatctacatgttaaaagaaaggacaactgttttacaacacttgctataaagtagcatagaacaagtattgaattaatgaataagttaatggataagtctgtgaattacacagaattttggcaagacaggattcctctgagcagcccaaacatgccttcctgtgactggtggaactggaagctgtgttgtgattagtacaaatacaacccttcattttcacccttcctagagttaagcagggtgttttagagtcagtcaggagacatccttttttatttttgtagtaatattaggcccaatgaaggatttctcaaatggtcttcccacccttccctggatgtttacatgggtagagtggtcagaagtagtaacaggaagaggaaaaggcagctccagctccagtggcaacaagccacagtaagtagtggcagcagccacatagtagggagcagcctaagtggtagtgggtggtgagaaagaggcggcggagagagtggtcatgaagttatgggtctgagaaatccagagactgcaggtcagtccctgggtaccaacaccagaaactcaaaggctgtaatcctagctggtgctcattgcggccaactgttgatagagtcaactgttgagtgtcaagggttctgggctactggaaaccgaatccagagcagtaagtcttaacgtacattcttagagctttttgattctggtttttaaggttcacagacataaactatagttctctggctagagctataaacctttgaagtctgtcagcccagcctttgcaactcgagggtccatgtcttccattagaagacggacatcattatcagtgattttggtcctgatggggacccggccaactcactggtaactttgcagcacatacagagacaatgcaccacacagacacgggggtatagtgtaaaacaagagagctggagaacggggacagacgacaggagagatgctacgcaggaacaagcccacggtggtacccaacaaattcttgcaatgggacagaataacgggttcttccaagcctagggcccctagggttaacatcggttcgccaggtgcttccagaagcgatgacacagttatcaggaaaagtaaacttttaggacttcccggagtgggtgatatatgtggtaaactacggtcagtctctactgtactctctcctgagccaagaacttcacaagaaacgtcctcctagtgccccaaagtcaacgaaaccaacatccctcacatggaggtgattctgaggggctggggatgtcactgcgacctcgagcccacatgtggtgcctggcacttgggtggacggccgcgtctcccgggatggtgggacacctggttcgccccgaccgcgactcatccaggggcaggtgaaggcggctttccccggcctggtcccgcagccccgcggcgcggcggtgcgtgcgcggggaaagccggcctcggggaccccgtcgagggccccgcggcccggggaagcccacaacttcccggcgagcacgccggccccgcggcgcgggctgccggggggtgttctcgcgagaggaagccgaggggcgcgggtcgccgcgggtctgaggggcgcggggcagcctgggggacgagcgcccggccggggcgcggcgctgaggcggcgagcggggccggggcgcggggaagccgctcccgcccgtcgcggagagccagcccctgacgtcaggagttttcctcaaagtcaacaacaagccccgcggcggcggcggcggcggcaagacgcttcagcggcggcggcccccggagggaggaaggagggggcggggaggcggctgccgggtccctgaggcgaggcgaggccgccgtccggggtccccggccctgtacgctcggcccggagcctccgccccgcggcggggcatctggccccggccccccgcccgtgcggcggcgttttctggtgatgaattgaatttgtagccgatatccgattcccaagtagagtctccgcctcctcctcctcctccccgcgccgccgccgccgcccgccctctcctcctccctcctcccgccgccgccgccgcccccgctccagcgccgcggcccgcccgccgcccgcccgccggccgcccggctccctccctcctccccggcagccttcgtctcccctcccgccggcagcaccgggctccagggggccagaggctcagcggggtgggggggaggacaggaggggaggaggaggagggggacccccgagtcgccccctctcctccccccgccccccctctccatcctccgccaccgccggagcagctgcggggccgccgccgccgccgccccgccgcctttgcaggtaacagccgccgcccccagctctcccccctccccgcccctccccgccccgccgaactccccgagggcccgcggctccctccctgcctccctcgggaggggcggcggcgacgcgggtggtgaggcgggggcgtctgggtgtcaccgcggccggccgccgggggcgtgggcggggaccgggtttccccctccctcgctccctcccttcctcgctccctccctccctcccgaggctctgggtgtggaggtggaggccggggatgcccggcctgggtgacagccgacaccccctcgctcggggggcggggacggcggccgtgcgcgggcggccggggaggggggttcccggcctagcggtaccgtgggctgcgtgtccccggtggcccggcccgggcgccttagggctcgcttagctcgggcccggtgccttcatccttactcgccctgctgcgcgggggaggggaggggaagggaggggcggcgggccgggcccggccggggccggggccggccggggcgggggcggcggcgaggttatgtaacgcgagcagccggtggcgagtcggtgtttgggttggggggaggggccgtctgcgcatgtggcgggcgtgcgggagggcgggagtgcgggcgaggatgcaccggcgtccccggggtctcctgccttcgccagctaacccaccccgccgcaccccgccccgccgcaccccgccggcgcccgggagaggacggtgtgatggggtgcgggtgtgcgtgtgcgaggtgggtaacgtgcgagtctgtgtttttaatagtagtggggttttgatccgctagggagttgtgtgctaagaatagaaatgtgcggaagatgctgggtttggctgatccactgatgctgtcgctgctgctggcggcggcggcggcggcggcggctcaggctgcaagtaaacaaaccagcttcttccttgtccacctccgcctcctgcgcatcgcatcggtctgcatcagccatgatgctggtgaggaggccctttggaagccccaagttgaagcttaagctggtggcaaatgatcgtcctgatgccgaggcggggtcgccccttgtttgggatttcctgggaatctacagttaggttagagataactgaatctctttagggccaggtttttacagtagtggtgtttgctgtttatctctagaaagcctgaaaaaaaaaatgcttatcctctcatgtctccatcaaaacagtgttatgaaaataaaactcttttcaccagtgtgatgcattttggttaaacgtgttgatggattgtagttgataaaagtttacaggtagaaattaaacaataagacctgtgtatctttatcaattaatttttgtgattaatagaaccatcacacttttaatgtgtcctgaaagggatatagaggaaggacttcatatgcaatatattgacacttgtctcaaatcatcagtttagacacgtgctccataattagtaaagcacggtcattatttttagtagaactatgaatttctaggcagttactgcgttttgtttatggtgggaacccgttatattaggttatatattcacttaggagaaaagttgagaaagtcataagtggaagactccagtaaggatggtgtagggtgtgaagatgggtctgaatattccagacgacagttgtctgaaacgttttttaaaagcatcttcatgaattactagttttccagaatatatgactggaatcacttacactcgagaagcagttcaaaattgacttttgttccttttgtcaatatgaaatcttgattctgtttaatgataactttttaaaaaacggagatgaccccagtgtctgtagcttgaggatctaattttaaagtgtcatttgaatgtgacaactttggatgaatgtaggtgcagtattttgtttgtgttctgtatatttgcagtagcatgttttctttcagtttttaaaagttattactacaaaaatgacgaaatcgttattcatattaatcttgtcctgtatagttaggttttctgtaatgatgagtgaataattttcaacttaaaattactttttttaaccttgactttgttttgcattgtatatgcaagaatacttgaaaattcttcttctaactttttatatttgtaattgtatttattatgattttggaatggaggggtgttcttgtgtagcttaggctgccacgaaacttactggcctgctagggatcttcctgccccagcctcttgagtgctgggattgcaggtgtgtgccaacaatataagcatgtttatgtaatttttcaaagaaaacattttaaataaggttcattttcctggagaaatattaagatgaggagtgtgctttgaaggggtagggttttagcccttctttcagaagatcatgtcatgaaagtttgttttgtagaatcactaaacatctaaagtcttttggttaaacttggttaaacaaatgttagcgtggatttctgtgtagaggtttaggagttttaaactccaggttttgactttaacttggaagtttctaaatatttaggcttctttctaaagaggaacttgtttcatacattgttttagaagttatattttcatgaagagataactagttatactttactttgtaatgtatagttcaagaatttgtccctgggatgaaaaggtgattcctgttaatgtattaattgaatctgaatcatgatttagtaagatcttagctttatagtgattatgtttatagtattaagaagaagacccaatttgggatcattttaaatgtgcataataaaatgcaatatgaaaaatcattttctttggtttattttgtactgtgactgcaatttcaagttactctgaataatgcaaatatttttaatgggaggtttgtgttaaaatctctgagtaatttaaaagttgctgttgagcttcatattgcagctgcatcatctgtatacttaaccttggtttagtgcagcatattcttttgcaaaggtaggctaatatcaacagatgtgttacagtctgtaacatctgatagggttagcttcagtttccacttaactctagccacggcccttgagcatttgtcatgtgccagatgttgctatatgtgctttacacactgtaattcatctaatcctcagagcagtcttgatgcacttttgaaagtgaatgtcgcatgagaaaacaccccatacagcataaaaataatttcatttaaattttcctattctgaaacactttgtttgtgcccattcttagagtccacagtggcatcgctaagtttcgaatatatatgctatgatatatattataatactatactataataagttccacagaatcaagttaatatagttttaaaagctgtattggttaagctgccaacatttctatgatttttaaatgtttcaaatgccaaaataaatacaactgtttacacattttactgtagtgtactttatccagttagaggtacatttatttcttttgcaaggaaatcttcaaatcttgatgaataaataatattctttttgacttattaatgttttttataaaaactatttaaatatatttacttaaagattattgcccttttaaagtattttacatttctaaatgggtaatttttcttgtattctgaagggaaagtataaaggtttagtagaagtaaacaaaagatgttcagatgagaatttcttctatattaagaaagtccctgactataactggatgtctgggggatttggaaaggaagatagaatttagccaataatagaggttagcccagatttggtctgagttgaatagctacttgatgttttgtattaactgtatattaagttttgaggataggagctgtacataatcattgtcatctacaataccacttctgtatgaagtcaattgtagttttcaatgtgaagaatcttcaatattagctttgaaagagctatcaagcatctaatgctacatttgtttttcagctaaggagatggaagtaaagagaattaaagggacattattagcaccactttgagcaaggcagggttgggaacagttattcaagttttttggtctgtctggtgctctttctaaaggaaactttgagatgaactttgtcagggattctaatcctggggagaaaatatgccagcaattcttggtgttcagtggactataggtagattttatgtgcgtgtgtattaagtattttcattttatagtttgagaggtgtttgaggcagattttagaattgtatatgtgtactaaatcaaatggccagctgagccagtattctttagtagcagtcctcagcctattgtcataggtgccttcatatacagataagcagcattttaccttagaatcaaaggggattgcttcatcaatagcttgtttattggcttaggtgaagtgaaggataatcatattcccagtgttttaaatcagaatattaggtatatcacctagcacaagcttttttaataatggatatgtcggttgaggttgtaattgatgtcctgaatagagaaaaaggagaaaatgctttgtgttttttggatatatttttaagttagaaagttcgcttttaggaattagtaatttgaaagatctgacaatttgtctaaaagttccaggtttcagaaaaaaatttccacagttattattgtattgtgaagagaggaattgttaatagggtgactactgcaggtaggaacagattactttagagttattggaaataaagacaaattgtgtagaagtctgtgtgtttactttcctgcatatccttttgaaagtttgatacaacgttgtgtatctgtcctggcagataaattagtttcttctgtttttttcttttttttgggggggggttaaggccagggtcttgattgttccaccacctttcacagctcctccctcttactgttttcattgtgagccatggtctcaccaagtgactcagactaaccttgaacttgctgtactgactagactggcctcagacttgtgatcccctgcctcagcctccagagtagctggaattgcagtcatgtgctaccattctggcttaaaatatagttactgaaatctgaaactactatagaatctaaagtagttcctcttgctttttatttatgttttaaatatcaattatgttttaattagtttcctttattaattcagtttgactatcataaagtctacaaaatgatagcatataatcttacagccaaagatcaactgtatttcaaagaaagctattttgaattttaatttcgaaataaacatacaggaggccaggtttggtgggtcatgtctataatctagcacttggaggtttcaggcaggttcagggacgttttgggatacatagtgagttcgaggatagtctggcctacaggtctcagagaccaccccctctcacccaaaaagaagagagagttaacacacaggaaataactaacatatgaaagaaaattactgggtgcgtttcaacctgtttagttttatgttatttcatttttgatagttttgttgatacttttagtttcattttttctttggtttactttaaaacatttttgataattacatttaagagtttatattttttatttttgtataaagcagatgaaactgatggaagaccttaattgtgggtgattacttttattgattgtccccatgtgtggtaactggggaatactgtcattgtttttggccacagttttcttaggttcacaattcaaagacaaataaggtgatgtaaatgaaacatcttggataacaaatatataatagccttgggaaagacttaagataggcttttagttcttgacatagagtagttagaagatatatatatatatatatatatatatatatatataatttattgattaagtgtagttatagttcacatttttgagggaatgacattctaaagcatttttgatattgctttaaatgcatgactggttgctaaagtcttttgaaaattctttgaagcttcagtaaggaaatacttgtctcctttttcttctcataatgaataattgtgggtaacattgaggtttcttttatttggagttgaaaattgatggtctcaacaaaaagttatttaaaatgtcaagaaaaaatagtgtagttttaatgtagtctcaccttgcactttatggaaggccataggaagcatgatttaacatccagggattttaattatttatatataaatacttccatgatgtttaaacttagttttgttttaaaactggcactgtgctattttttgatgttgacttactaaactcgtttgcatagtttattatctaaagctgttgcatctttgttcgttcatctacttattcactaattctgtatttgttgaataagtgccaggcacagtcaaatagctttaataatttatattgtgattcagtggaattaaatatgggaaatgttttgcacattataaaatgatatttaaatgaagttatcatattctctaatagtgaatcatgaatgaaaatatctttactattgaatacactatgaattttgtgtgtaactttttataagaatggtaaaaattagattatctggcactaaagtatttaattcaacatactaaagaataaaccaaattttatgtaaactcattggagagaacatacttctacagaagttaccatggaaggagggtgaaacctgctttaccatcagaaacagatgtcagaactgtagctcatctggtcagctagtgtggatgaagtgtggggcactgttggtggctggagcaggagcatcgccacttaggaaatctaaccagagaactttactgcttaggagccaatcacattgcttttacatataaaagacagtgttttctgctaatctaatgattacatttcaaacattatgtttaaagatgttaccattttagccattacacacaagaacagattttaaagatgaaaattgtaaaatttggtaactttaacatacaatgaatgagaccgcctctaataataaggttcagtgagtgacctgataaagtttgtaaatcttgttgttttaatataatgtccattttataagttcagtcttaatatatacacattgattattctcttggtctctctcaatccaagaaactagttttcagaaacaggtccattataaaatactattaattgacttgggttgatctggttctatttcaggaagatttccatcctcttagtgttcttaatggtattcttgcacaatttactttaattggaagggtctcttggatgttaccctaatgtttattctagttttattccccccaaaaatataaattctcttttgttgagattatatagttttatagtgagaaaaacaacaacaacaaaaagatagtagagatcgagcccaagttcggaaatcttgttttaatttaatgtacattttataagttcagtcttaatatatacacaacgattattctttcactctcaatgcaagaaactaattttcagaaacaggtccattataaaatactattaattgatttgggttgatctggttctatttcaggaagatttccatccgcttagtgttcttcataagtgtattctagcacaatttactttaattgcaaggatctcttggatgttaccctaatatttattctgcttttattccccaaatgatataagttctcttttgttaagttatattgtttttcactagtcattttgcattagtcttttccaacatttaacttaaaattatttatgcaatgtatagggcttaccctttgatatatctcactgtaatacgtagttagttgggttcttgaggatatgataggatatgatgccaatcaaaataaaatgatgtttgaatggctgtacttaatggcttttatgttttttttctgttgttaatgtgaagtgaatatcattttaaatattgtgacttttccccttggcagtattcagtgtgggaattgcccatggtagattatatcttaatgttagtagagatgtttgaaaaggacaaaattataaaatttcctcaaacttacttgaacaaaggatttattttctcaaatttcttttagtttaattttcttccagtcaaccataggagcatctctttattctgcagtaacaggtctccatgattatgattttgagtagtcctgccccttcctgtatatattgttcatgacatatttgtacagccatgacaaggtagtcttctgttgaagcaattggcctttgtcagattgttcagaggatgtttagttttgatcactgattgataaatagctaggctttgcatataatttgtgttggaggaagacttgtaacctagttgagtactagctgggaatacagcctgtgtactatttatgaaaatccacctgtacccaatgggtacagttactttatgtacccatttttttctggttacctaaagttcatgctgtttgtcctaggccacttaacaccagcgtatctgttccatatttttgcaaatgtagaagcactttgcagagttttgtggaagcatttcacttctactttggtagggacaataataaacagggacaataataaacagttcattaagcttattgctatatatgtaagaaaggctttttttactctaacttatcatataaagatccaggggatacatttctagtgtttgtcttaggaaacactatatttcttctgagcaacttttttttttttttaaatattgcagatactgttaaatactgaaacctatcatgtttttgaatttccaagtttcctaaaacatttcattccaaaaatttggctcacctttcacatgtggagttttgaaatgaggagagcagacttgggagtcaggcactctgaattcatattttagctctacaatttactaccttgaaatctagcaactttcctattctctgtcagccccggtttctcggttctgtgaaatgaagttaatagtgccctaccagagttgtgaagattgtcagattatgaagatgaacagttcttggcatgtcttttctacctcctattccctttgtttcactttctttatctaccaaaaaataaataaattataatctacatgaaatattttttagagcaagtcagattatgtaaatgttggcttcttggcacattgtattttacataaagtacagcaattaacaatacttaaaaatacattgacataactttctgaaattaaagggatttgagctacttaactttcattctttctcccatcatctcaagtatatattacaaaaatgctttctgtttatttgtggaggtttaacagtggttttgttaggacattttatttcaggatcttagtttaaatgtttcactatcatttaacatttgtcacaagaccagagcagtgtactcattgtagagctatttaataaataagcgcccccccccccccatgtttgaagagctagactatgtgaagtgaggccagttgaagacatttacaaagacttagttgtttgttattgctctgtgagttcaagaatggaaaaaaaagaaattctttcttcaatacttccttccaggctgagtcatcactagagagtgggaagggcagcagcagcagcagcagcagcagcagcagcagcagcagcagcagcagcagcagcagcagcagcagcagcaaagaatccaaatcctaaaactgatcctgcaaagcatcatttctccaagttgggggctcagaggggagccatcatgagcgatgttaccattgtgaaggaaggttgggttcagaagaggggtaagttaagtgctcagcaaagctgcaaacagtgcagttgatgaaagtgttgaacaatgagtggtgtgctgagagttggtctctaccctggtgctgctggagtaaaccttgtttcactgtctaataagacagaaatgatgctcaacatgtaggttaggaatttgcttattaggggtttccttttaaatgttgatttttataatttgtaattatgatactagatttttgtatgcatgcatgttagtaatgtattttttctttggtgtcttcagattccacagacttcacagaattatttaacatatagaaaaggactcttgtgtctgtatcataatatatgaatacttaggtaaaaatactacattgagttgatttgtatggtagcagaaaggttatgtataagggggaaggcttaatctataccttgttggactaaacaggctcataaattaggtaagttaaagctttgatattaaagtacaaatgtggacaatgattttctttgtgtgtttaatttgctattttttgtttacattatctacttttactatgtttttctttagctaaattcattattttttattattaaataattctgctgtaaaactttatagtctgagtaatcactaccttttatcatctgtgttcattagatctagatagacttcaggctggtggctcagccgctgtgtctgtctacctgcatgaccaattgaataggatgagggatgcttttgagtcctgtatttctttttgctaactgaaagttaccttttaaacactaattttcaaattttgtttaatacctatgctaaaaagcctcatgcattatgggatttaaaagtaggtctcattaagttgtataacattttaatgagttgtgccaaatgtttgtggtgatgtaacaaactctacagtcccgatacagaacatgaccatcaatataaaagtttctttctgcctctttggttcagtgcttctctgtcaaccttggcaaccacttaatgttctgtctcttactaagatttcaatggactcatgaaatccacagtcttttgtgtctggtttctttcctgtacatacttctgcgttatccatgtggtatatgtgagaagtagaattctaagttctggaaatataattcatttatttgtttatttttaattagttttctttttgaaacaatctcactttatacccaaggtcatatgtagctcagttaatcatacaccttgatgaccttcctgcctaggcatcgtgagtcctgggattataggcatgtgttatcagttctggctttgtctttttaatacttagtagaaatttgggctgtctctgaatattttgaataaagtttttatgaacattgaatacatgcctttttataatgtacttccattgatcttgggtaatagcctaggataagatttcgggctatatggtaagtgccttctttaaattgataaaattgtcaatttgttttccaaagtgactgaccattgatgctgttaagtttttcttttattttattctcatgtatttggggaacattctcagatttcagtgctgtggtttttgttttgttttgtctttttcttgactagtttatattctttcttttttggggctcagaggaggagagaagatggcaagtcacttaatcctttcaatttttcttttactagttcctaaaatctgctttgtaagactcaaatgagagaattactatggatatctctgtattcctgtttgcctaaggcctaagaccttgagtctaactaactgaatcttttctgaaataccataatggaagattggtatttagtccatagaatatataatagaaaacaaagaaaatggtgcaaaagaaattctgttgttcctgtagtggtcagagaagtacacacactctgtatgtctgtctgtatttatgttcatgtttatgagaagttgtaaccatctgaacaaaatgtgagtagtactcaatggtataaaatgaaaagtaaaaatatttctattctttacctctttggctggttcctctctagagaaagtcattgtcattttaattcttctgttgatcggtatcctaactgtaatacaatacagtatattatttttggatagttgttacattatctgatgtctgtgttatgaaaatgaaaaaattaactttgaagacccattcacctttttctccttttattctttgcctttatggctaaaattcagatgttgtactatcacctttgaggacattatctctaaatttgctttttcaaactgtgtcttgaattcctaacattcccctcatggattgtgctatctataatatttattttatattgccaaggtttatagtaaacttgttgattctgaagagcaatgaacaacattttaatgctgtgatatgagggtatcctaaagataaaagggattttttttttatctcctccgttctcaatatcatgtctttctatagtttgcatcatgattggcttttttttttttttctgttttgctttccttttatgacttttgagacaaggtctgactgtatatcctaggctgaccatcaacttattttcctcctgcatcactctcccaagtttggaattataggtgtgttggtcatgatgcctggctccgccctccccccccccaacattcttaaggccatgttttcctgctgctggttgaagtacatacactgtattcattggttgtttagcttttaaatcataatgttgaagtactattttctggttaagaagctaggtaacactgtgtcaagtttccatgcttccttgaccctcatgtcattattcttttgttttggactcactttacagtttcctgagctgatatgtgttttcaggagaaatgtatgtgggtacttgtcagtgtaatatttaaaactgtcctttggactttgatgtctggtacattccttagctgggtatagaattcacatttaaattcgctttcattcagaattttgaaggttacatttctttgtttttagtaatcagttttgttgaggaaaggtgtggtgctcatgaattgtttctttgtaggaaattcatttttgttctctggaacttgttgatgcatctgtgtctttggaattaagaaattaaaggagagtgaatcacagtgtcttttattcattgtgttaaaaggtttagtggatgatttgaatatgaaagtttaggtctgtctatagttttcttatgtcttttttttctcttgtatattcccttatttctgagagcccctaaatgaatttgataagttaaaaatattcttatatttttccatgtctttctagaaaagagagaaactttttcttgaacattttattgacttttttttccagtctgttactgaataattttgtctgttactttatatttctagaaattctttgtagtttagttacttttataatagttgagaacactagttttcctcctttttttatttaagtatttcagtttggtgataatggttcttccttggtggttgtttcttcaggtgtctcatgatacagttatgagagaattgtattattggtagtgttttttttttttttcttaccattatctctgtatttttgacgaacaggtttgctgagttagaatttgtgatggtaactaactgtactcttgaaagcactagttgaaacactagagtaaataaattctgtttgttcttttagacaatttcagtactgtttgaataatagtttcatgtttcagtcaaacatatttcacaatatagaccattgcttggctttcattaggctccaagaatttctcttctccaaagcattgttatttatcctggacagataattataacctgaattttggtatatttgtttggaaatatctgtctcctctatctaacagtgtggtttaagcactattaggtatacgtgtagaggagtatattaaaattacttactatagtgattaaatatacaaagttataatgaagttaaattcattcttgagtgttgctttctagttgttcattggtagagcacatgctctcaacactgaaaacagccataatacagttcttagtttgaatattagttttatttctgtctataattgaatacacaaacacatacacacatacatatatatattatataatatatatatatatatatatatatatatatatatatatatatttgaatcacctcttgataatttaactcttttctagatactgcctgattttatttgtacccttaatataagttgaattttcagtaaataacttccagaaaatggggaaagtggtattcatgtaggataagtgttttcttagtcttgtttgttagagatttatcaataatcaaactgttgtcatgtgggcttctctgtagcagttgaagatgattattcagatgacattcaaacatagcattactagagtagatcggcagttattacatagcatgggctaagttaatatcgttttcttctgtggtggacctaaggagcactttatggccttgctttgtattaacatagtgaccacttgtatgtgtagcaaattcttaatgtattgttcaaaaactagtctgtagatttgtccagactttttagctagatcgtttttaagagctagttagtaaaagcctgatccattggccaaatatttatgattaacataagccgctgagtggttattcaggaactggtggatgggagagaaactcccagctacattaccttctgcctcaaggcctattactgttctttccttctgaatatctttcactgcttctcgtgtctggctggcatctgcctggcttctgaccccaggtgtctccctcactctctcctcttttttctccttcttttctaatttgcttgagcctagatttcgcctcctatttattctctctgcctggaagccctgcctatctttctctggcctagctattagccagtcagctttttattagaccaatcaggtgccttaggcaggcatggtgaaacagatgtaacacatctttacataattaaacacacatccttacacctttaaacaaatacagcatgaacaaaagtaacccaccattacacagttaaagtaatattctacagcataaacaaatgtaacacatctatatttaaaataatattccacaacagtgcttattcttttctaatatttctcggtcttatgagaattacccaccaagagcatgtctccagtgaccctaaggacatctcttcaggtgtcactcccaaagcgtttaccatatctacaaactgccaccattggaaccaaacctaacatcataaagaatgcttgggtgacccttaatcacaccctaagtatagcacttagtagtaatttatgaatgtagagagtcagttctttagtaacaaataggatcttagtatttaattatttaattaaatgtgacttttgagaaattaatacagatttaagatataacttatggaaaacattttgattgatgaaaatgattcctgtgtgattttgttatacctgttcattgttttagtattagaagatttgaatcttcctgttgttactctgttgtaaccagttatgccttcaaataaccatttttgttatttagcttgtattataagatctataaactctgtcaatggaatacttgtactctgtgggatgatttagttaaagtagatttgctaatctaaatattttgtctattaattgtcttataggagctaaatcctgttatgcaaaatacattgtagcaacataaggattgtgatcaagttgtattgtgatttgtggtttggtgatctagtaaaattaacataatttgcttttagggctccatctctcttttatagggtatcccactcactcgtcagccacttttgcaaccctgaatgacatttgaccttcaaactagtaagattttgagatttccgaatgctgtccattccactttaattccaaataacctgtgagccctttaagcaaaaagttatgtaaggacaaatttcacctagtgcagttctcttcctttagggactaacttccctccaatttttgcctgactttgctacttttcattttctttagtttttaaataattttttaatgcaggatttaaaaattttaaaaagtggaattgctggatcttgtggtagactgattcccattttcctgaggaaccgccatactgatttccaaagtggctgtatgagtttgcactcccaccagcagtggaggagtgttcccctttctccacatcctctccagcataaaaagtttaaacatctcagtttgtcagtgtttctcgtgtgtgtgtgtgtgtgtgtgtgtgtgtgtgtgtgtgtgtgtgtgtgtgtgtgtgtgtgtgtgagatcatatgttgctgaaacttttctatgttctgcagggtctcacaaccacttcaaccccaaataaacacacagagacttacattaattattaaattattggccgatgactagggcttcttattgggtagctctgtcttaattattaacccatttctacaaatctatgtattttcatatggtcttggctcaccgtagtatgctcagacctgctactcctttgtggtcacatggtaacatgtgaatgtgattttgtagacctggtctgtacaaggaaggacagtatgtgactgttagtgtcttccatatcccattactctgtgatggtattgttaattgaagccacagtcactttcccaattcctttaacagaacttttattatattttgattatacaacattcatctgtgtcaatttgttttacagatattagcaatttacagttctagcatgtgttgtgtaaaggtttttggtttctttaaaataattgattacttttatttactttttgtttgatgtgtgcccatcatgacataaatgtggagttcagagtatagcctgttggagtctctgtttttcttctaccatttggatcctagggattgaactcagggcatcaggagtagctggaggtgcttttactgatgagccatctcactggcataatttctgctttcttagcccattgttttagttactgcatattaatctttttagttttttgctgtttcattgctattttattttaacatttatttacttctgaggtttaacttttaaaaatggattgttttttatccttagacagtttttatatatgacctccccttagtcttacagattttctgttgtttttgtaagtgcttttcataagttcatgatacttcatcttattaataatttttctttgaaaatgtattttttggtatgtcagtaagacctagaaaagctaagttataactcatggggttaggacttaaggtaaggtagaggatgggaaatctgttaaagaggatgcgagaatgtaaagatcttgtttagtcatgtagtagacatggcagggttctaggtggccccaggatccctgtcccatgatgtttacaccttcaggtaacctattttgcttgagagtaagaacaattcatggttgtcttccaatcaatacaataatatacctgctgctatgtaatatttcattagtggttttaaagatataaatagccaatggcatggcaaggagtagtaagcacgtttgctgtaagtatttttttatttttagtatgtcttctaacttagtggtatatttttgttatttaaaacttttgaattgttacttctttaaggcaggagtctttctatggtgcaggctgtcctttacctctggatcctcctatgtttgcctcttgagttttggaatttgtaatctataattatgcaatttaatatatcaaacattttcttccaagtggaggtcatatttagaatttgttaacctgtattacttgtattacatcattatgattaagacaatgctttttagttaaataatacccaaatttctcttggagaaatttcaagatatacatactgtatgatcccattttccttctcagagtgtttgtgctcctgataggatttttatttttaatttatgcaagtactataactgttttgtgtgtatgtgatgtgttttatgtatttgttagtgtaagtatgtacatgtgtgcatgtaggtacacatgcatgtggaggccggagatagacatcaagtgtctttcctgcattgattgcttttcacctttctattttaagatagggtctctcactgatcctgaagcttactgatctggctaggctggctgaccagtgagcttcaaggactgctgaactttcttcccctcagtgttagggtaatagaatgcacctctatgccaagctttttatatgagttcgggggatatgaacgcaggttattgtgcttggttgctaggtactgagatgtctccccagcacctagaagtatttttttaattagaggaatttcacagggtagtctttaaattgttataaacttaaaaggttagcttctgttgacaatgacagaaaactcagataacagaaaagcaaagagccttttccctcacacttaaaatataaagattggtagctgttggttacttagcatatcaagatagaatcctcatatagtcaaacttgttctacatgcttcacttcttagcttgctgctttaacagttcagtgacaaaagtattatgtcaagacacacacatgagagaagcctggtgctgcttacatagtccttgatactaaggaaacaacggttttctcagaagctcatagttctttgtgggcaaggccaagtttgtctggtatggtatttggaaaaataccataactaagctatgtaaagttagagtaccctaagttcctattatgagtgtaatgataaatgtgatgtttttcagttgtcaaattgacacaacctgaaataacctgggaaaagagcctgatggggagggtttgatgttatgatgtgagtgttttaagtttcttcattgtgacttctacactcagtggatggtaactttgaattgtaagctaaaataaacctccccttcccttgttgcattttgtcatgttgttttattacagcagcataagtaacagtagaacagtaagtcaaaagccaacgtgaactttcaaccatgtgagcaagataccttggaagtaagtagaacccaagattatagtacaggtcaactcattgcacgtgataccatgagagatttaagttttgaatcacctaggtgaacttctcctatcctctgattgaagctattgattaaaagttgtagtgttgaagatgttaaaactcttgagtaattgttattctgtgatagaggaagagttagtttttatagagtgggtttatttttttttgttacaacaaaattgcaggagtatcttgaaatttctgaatgggacagatgtttgaagaattctgagatagtagaaaacagtcatgtacaatgtgaagcaaagagagaaactaaaatttcaggcttttttgtatagctaatttaacttaaatcaagaggggtcatggatatgggaagaccagactgggctatatagtgagcactttctcaaaaaccaagtctttcacaccttacccaccctaaaataaaagaaattgccaggcattggtggtgcacacctttaatcccagcactcgggaggcagagtcaggcggatctctgtgagttcgaggccagcctggtctccagaacgagtgccaggatagtctccaaaactacacagagaaaccctgtctcgaaaaaaaccaaaaaaaaaaaaagtttctggaaaagatcacatctagaacactcttgaaataaatagttatatatgaaactgaaggtgtgacattacagtcctctaagattcttgaatgaaccaaggggctatttgtaccctttacaacatgttaaaggaccatctttgtccttcccatccttccttcttccctcactttctccaaatattattaaagatcatgtcctgtacctgtagctatactagctatgtaggtagagggaggtgccacttggttcataggtagcaagttttctattcttataaatcagtgactgggaatcctaacattctcattcaatatgtctggttagaaacccagaaaccaatccctccccctatgctctcctctttctgtcccttatgcagtctcattccctttgcctaagcctcctagtacctgagcttttaattcattaattaattagcaaatgtttattgagtgatttcctgtcatagtcttattattgtttgtgtagttactgttggaatgtgtcccaggtgcctactctctaatgggaggacagagatagtaaacaagtaattaacaggaacatttcatgtagtgataagtgttatggaggaagtaagccatgatatgtgttagagaattgtcagtaaataagaagatgactgcaggggtggtcttggaaggagtctttgaataggtgagtttatttttaagctatctatcaaatttaccattttaaagtgttttaattcactgccatttgttggttccattgtttgtgcaaccattccttgctgttaatctatagaacttatttttttgtcttggaaaactgaaagcttgtattcattaaacatcagactctgacctcttctcccagcaaccactatcctttctgtatctatgagtttggctcttctaggtaccttgtacagacagactctgatgcaagtttgtgatgctataatacttggaggaattttcattcttgtgatgaatcctactgtcagtatcctgatttcagagacacattctagcaagtctgaataacaatcagacatataataataacatttatctcatttctttcctcaatccctaccaaaatggaagaaacagaatgagacaaggagagattagcacagaagacaagaatttctatactttaaaaataatgctgacaacaggcagtaatggactctaatgagcaaacatcacagcctataaggcacagtgctagccatacgtagtacaatactgtgtttttctgaagttccaagaactccatcatttgaagactccaggtagtaaggagggtaggagtcagaatagggctgaaaaccaatttgattgaaaaattaacagatgtaggtcttttagttattctcacagttttttgtagatggataatttctttgaactcatcccatagatttgggtgaccaaggtttattcttccatagttagagaaagggtgcctggattaaaaaataggatagtggatagctgcttaggttaaaacatggagaccaaggctaaatagacacctgaactgagaaacttgaagcagtcattttctacgttttcccatcactccagttatttctgtcctacccacctcctgcagaaaactgcagacacagcaacatcttcagatgctggtagtttaccactgcagcccccagttaccaagccctttatttacatagatagttcaactatttctcttcagggtcttacacttaaatataatcccaacagttcaaggccatcatgcatttggaggaaactgtgtgtgtgtgtgtgtgtgtgtgtgtgagtgagtgtgtgtgtgtgtatgtatgtgtgtatgtatgtatgtatatgaaaggtcaaagtaaagaagagctagcagagggacttgttgacaggcagtgggagaagacaggcatcgtaagaagggtcaaaaaccaaacaactccccacccccagcaataaagggtcactggcatacatggttcagcagcccaggcttttgcattagtttgattgcctgagttcagtccctggaacccaaaaagatggtcagagagcatcaactctacagttgtcttccatcctccccacagtgtaccatatccatacattatacgcacaatgataataactaaatttaaaagaaaactgaaaaaacaacttctgggattttcagaaaagacatattttgctcttcatttaaatgatagtaggagaacacaaaaacaaatgtataaaggtcaataaaactggatgaaaggtgacaacacctactaaatattgaaagccaaagaaagcctgatgcagagaaataattcatatagcaaagctgacaactgagaatgttgtcttacagtgtgggtagttgtgcaactcaaccttaattttgctttaaattaataccattccgtgttctgtttagtctaatggtcttcctcccctcctccctccctctttctcccccccccacccctttctctgcatggtctttcttagccttggcttggctgaactggtacttaacaggtagttgtcaaacctcaaactcctgccaattctgttttgtccttctcagtcctgtaattctaggcacctccatatctaccttctgtttatttctgagtagagtgaacgaaactaataatcattttttgttttttttttttttttttgtgtgtggggggggggtggggtggggggtggggggagtggttttcagacagggtttctctttgtaactgttctggaactgctctgtagcccaggctggcctcgaactcagagattggccagcctctgcctcctgagtgctgggattaaaggcatgcgccaccactgcctgaccttctggttcttttatacattatgccttttgtattgctttatatgccagcattaatcacgagtggatagataaattaatttcttttttttttttggatggtattgacagagaagatggaaaagaatacttgaaagtaaattgccatcaatattaaatctaaggttgtattctaacctctgtttgtaaaatacttgtttaaaatttgattcttcttttttgaatactgtaatacagactagattctcagataaaacattgaaagatcagcaatgaagtgaacctttttgaattcttagatagacctaataattttgtatattttcttgtgaggggaaaagatctttcattagtgataattagattcatgaatttcattgccatttttctgttaagtcacgagtaaataatttaaatttattgtatatcattaaatatatttaattagagagttgtgatgattaagtgaaattaaagtagttaaatcattcaaaatagctattggacctgatgtttttgattttccttttctgtggcatgtattaatagggaatattgtctttctacatcttaaggcatgttgcatatgagttgatgatgtgtaatttttaaattttgttttgtgctttgaaatacttccttatctagctaacctgtcatactgtgagctagatgtgtgtccttgtgtttgctatttcgctagtttggtaatcattcctgatttgtaaagtaaagttttattccaagagaatttcagaaattttgctctggtgtattgtatcattctttagtctctgaagcagagatgtgtgtgtgtgtgtgtgtgtgtgtgtgagagagagagggggggggaagagaggagagaatgaatgagagagagagaaagagagagagagagagaaagagagagagagagagagagagagagagagagagagagagagagagagagagagatgtttggaaaatttgagataattggaagttacttgaccatttgactttattgttagaaaatgatttgagttgtgaaatctagttttgagtggaaatgaacaagacgtggtcatagcttttctttctacagcaataaatggatttcttgatgtctgcttgaagctgtcttgtgaattttagagccatgtgaattttatccttgttcatattaactcttctcttctcttccatagtttgaccattttattcctgggatgatggatgggtgtgtgtgtgtgtgtgtgtttgtgtgtgtttgtgtttacagttatgattaatgggctcagttggtagagtggttgcctagcatgcacaaagatctgggttgaatactcagcattgcctaaacctagcagggttgcaggtgcctgtaactccagtagccaggaggcggaaagaagagagtagaagttgaagattgtcttgctacagaaggtcaagctgaaggctaaccttggttacatgagacgttgtcttaaaagaccctctccaattttttttttaatttttatttatttatttattttttggtttttcgagacagggtttccctgtggctttggaggctgtcctggaactagctcttgtagaccaggctggtctcaaactcacagagatccgcctgcctctgcctcccgagtgctgggattaaaggcgtgcaacaccaacacccgaccctctccaatttataattaatagttgctaagctaatttcatcctaattgttattgccaaaggaagctttgacttcctccaagttacttgctttcatagttttctctttttgtggcctagattatgtatttggataattcttaatctcagccagactaaaagctcttctgctcactttcacctttcatatctaggatatatttatcattcaggacatttttaaaaataaattaacaattccccacaagtaaatgaatagaaatacaatgacaaatgaaagctcaaactgttgtgtaagattataatcatagattttgctttggccacacagtgaatttaaaagggaagtaaagactaatcaaggtggttgtagaaatgacttttattattgtttgttcaagaacagtgaacatttcctagtacaggaagtgactttcaaaaactgttggcagagctaagaagccgtactgttgttgacccttagatcaaatgttttagaacctgaatttccttaaatactaatttttttaaaaaaaatcgacattttgacatagtggaagagttattttacttatatttgacctttagatagaaactgactaaatttgctgataaaacaaaatataattcttactagtttcatttttaaaacgttttctttcaagtacactataaaatgagctcatctgtggattagcagataaacatgttgattcattcagcccacagctattgaatgaagcctggaggggcataatttgttctttactctgcccctggcagcatgtttttcttcctcttgtctctgttgagggaaggggactggaataaattactctagatagctttacctgaactttttagaagaccagggaaaaggatttttccatcattttttcttaatttttgtcatgaatgtaaagtcagtgctacgtatttgtgtaatatctatgttgaacaacaacttacagctctattttgctgacattttctcaaaaccatcttgcttaaagctttgtttggaataatctgttgtttaaagatatgtgttgggcatcttcagatatattacatttcttaggacctaattgagtttggaagcagaatgcagtttgctatatacagtagagtgtgatatactcatatgtataaggttgtagatattttatagagtttatatggaattgttttaataaacttagagtaagttgatccttgatattttggaccagcttttagaatataaacaagttatataacagataatataacagagtcctgtaggttttgcctgcattgtgctttaatttgcaatgagaaacaaagttttcgctgtcttcaaggagcttattgtctttgtaccattccctagacgttatattaatacagtttttaaaagtatattactatatataagtatatattgaaagatacttagaataaagaaaataaagttgtttgaagtgtagaaatttaaaaagaataattgtagaatttcaaaacatgatatggtttgatagattttccagactttattgacacttttttgtctgtggaactcctgaagtggaatctgatggaaatgagagagggggtagagggagagagggagggggatatacttagttagagcataaggattatatttaattaaaatttttattatactagtagtgattatattctactgatgtaatattcttactcaacctgtgcctctgctagctaatgtttgctgtagaatccctgtgtttaagtttttgttggtggaatgaggacccttggatcttttgattgaattattaaattgaaacagattagtaaataggagatatggaacctgttgcttctaatttagcctgacttaaagtagactaataagttctttcaaaacagttacacgtgctagcttttccgtttccattctgctgtttcaccttctctaggtacttaggcttcaaaatagttattattgaactttttttttccttactcaaccctactcttaacttcggaaatgatatactgactaaggtttcatcaacttctctcccgttatctgagctactcatctagctgagagttatatgaagggtatgattagtaatgattatatctagactgatatgtgaaaggttcaggctttgacgctgatcggctctacctctttaagagacagaccccgccccctgacaatactcagggcatgtgcaagaaaacgggctacgtcatcaccttatcacccgtcacccatgatgactctggacatgcgtggaacctcagtgcgcacgcgcagtcttccctttaaaagttccaactatcttgcttttctctctctctctgcttcctctctactctccttctctgtttcttcttggctctctctcacctatgtactctctctgcctctgtggcgaccggccatggcagtcagccattactcctgttcctcttctctcttagtctccctactctgccgggctgtataataaactagtcaacatgtctcatccctcagctttctcttttcctctttttaaataaaaacataacaatatgtatgcttttaggtcagtggttctcaacctgtgggtcaagaccccctttggggatcacataccacatatcttgcatatcagatatttacattacagtttataacagtagcaaaagtacagttacagagtagcaataaattaattttatggttgggggtcaccacaacatgaggaactgtattaaagagtcacagcattaggaaggtagagaaccactactttagggtttgggtatattttgtggggcatattttgtttgtggcagggcattgtatattccaggcttgcctcaaacttagtatattgctaagaatgaacttgatctcctaatccccctgcctcaacttttccagttttgtgattatagccataagccaccacatctgtctagatttaccctattgttttctgtcctgtaccactttatataatattggatgatttattttgatttctactctgtggccttggtaactcttttgtttaggaaattgatccagatgttttaacctggtactggtgagcagtaccaactaccattctagcttcaacctcttccataatttggtttataacacatgacctctgaatgctgcaattgtatatttatcatgaagtgtttacattgatagcttttttattacccatcaacagaatttacattaagtcctaatattctgtgatctttacagcttaaagtactattgtttttcttttaacattgttttaaactgctttagtgctgctatgtatattaattaagtcctaatattctgtgatctttccagcttaaagtactattgtttttctcttaacattgttttaaactgttttagtgctgctatgtatattatggtagttattaatatacatgattaatctactctgagattttgaggcaatagattattgactttaactgctttggcaacatatatatctatatctatctatctatatatgatatagatatatatgtttcatccctttttctgcaagtggttcctgttaatgcatgcttatttgcagcaaaccagaaaaggaaaggacagaagactatccaaaggagatacattaattggccagccgaacagtgacactccttgtttcctgcattttgtcagctagaacttaaatggccatattgactataaggaatgcagagtggtatgcctaggaagagattatggtgcatatatgacaattgccagagtgcttaaaagcttgtagttttcaggtcagacaaatatgaattctaaatctgtctgtgttgtttaccagatgtgatccaggaccatttgaagtaacaatgcaaaatactttgcttattatagtagtttctccttaagtgttggctgtcaacatcatcctcagtaacatgtctttgttcaacagacagcttgatatgtgtacatagatgtgggggctttgtttgatttgtgaggcaggatcttatgtagcctgggtttgtagctcaggatggcctgaaactcatgatcttcctgcatccacctcccatgtgcttggactacagatgtgagccattatgacgagctagttgtctattcagtaaatattaagtgactttaaaatggctggcttgagtttcttgtgttacagttccttttctttaggtgagattatggtagaactaccaggagatctatttataccagaagctataatatgttatattttattattatattattcttaacatttcttaaacattctgaaaccacctagaattaacccatacttcggaggttaaggattcagtccacaagactacccctccccttcaggtgttgattgtaaatcttggccacctatacttataagatacacataaagggttccctcttctttttcctcagggttagtaatatgctagaatgggccagagtacttaggaaaccacctttcttatgtttattggtttattatagaggatgttgtaatgattatggatgaatagctatataaagatacagggtaggatccaaaatagaccagaacactgtatcttccatcctgtggcattagtgtcactctcccagcacatagatgtcttcacatccactaatctctctcaaccctgtattttttctttttttaaaaaaaatattaaagtaggccgggcgttggtggcacatgcctttaatcccagcacttgggaggcagaggcaggtggatctctgtgagttcgaggccagcctggtctccagagagagagtgtcaagataggctccaaagctacacagaaaaaacctgtctcgaaaaaaccaaaaaaaataaaaaaataaaaaataaagtgtgtgtgcaaggtaatgggtcgaagctctcacatgaattgtatcctcaaaacacaccagcaataaacagaaaataaaataattaaaagaaaatgggtactggtttttgaatgcttttgaacaaagaataaatgtgtaaaatgattacttttgcatagggtccattagaaaagagggagataagagatacgggacctgttaagatattttatattgcaaagtacagtgttgattaaggtaccaaatacaaaacagccagcgatatagttgaagtgtgttttggtcatatagttcactcagcctagattttgctgttactctgttaataggattcttaatctcttgaaaaggtaatttatatgctagtggaatcattgacaagttcattccaaatgtagttgactgtgtcttgttctagctgcattgtgtctattttataactttgttcatactctgtctcagctgcttccttaggaaaatctttgctttacattgtttgatccacttacgtaatggttactatgttattattgaacattttctgtttctatttcagtaaaattttcttgggtttcatgctcaagaaatggagtctttagcagcctaattgtttatgccatatgattagataaatgaattctgtattggcagccttttaattctgtgtagcaaagctggtgatacagatgagctacttagtactgtatggatatttatggggccgtattgcttgaaagttgcatttaaattctggctttagtttctttaagctatatttttctcttgtatgaactttatttgtctgtttaagttgtcataacaaagtacagattgggtgtacaacaattctagaagctgaatgtttgagattgatataccagtatgatagagtttggtttcttgctttgttttcacatagtaaagagaacaacagagcaaatttagttgtatttattcttttaagggccttactctcatgacgtcatctaatcttagtcctctccaaaatgctctgtttccaaatatattacactgaggattaagacttcaacatacaaattttggagcagacacattcagtctacagcactgtcttatgttgcccttatggtaatttatggaatgtactcatcactgtgtctctgacagaagaagtgatataattagtctgttaacaattatttccccttggcataaattttgctcgtatgatgctggaggaaaattgttctttgatagtgagtctgtgatcacatgtgttaagaggggaaatacaggaagaagagcaaggttgcagatgtggtcttgagatgtttccttcactgtatcaggtttataggttcaaactaatgatgctaagtagagagtctttaatgttgtttagacatacagaaccttcaaatcacaagttcttgttttcacttttttttttaactttgagtgataggttggggttttttgtgagcttggataagcagatacctgtctacagacaatactaaatttattttgatggattttgagcaattctatttcagatattttggatcctaagcatatttggtattttaaaattagtgcatatgatttgctcttactttctagtttttgcatttgactttctgttctctaagttagtcaaaggctgattttactagcctttctggaactgtgaagaatctctgttctttcatagttggcaataattgtctccacatttactttatagagtcctctttggtggaacccacaggcggagaggaaacacaggattcataagatggagggcgggtgagtgattgagaatctggggtagaacttggtagtggtcctttttataatagtaggaataaaaatttgaacatcccattgtctgagtgaaaaaccaaaggacagtagatggtataagactttaatttttctcccatttcctagtgacatggcatagagacaatagtttggaacaacagtgagcaaatagtatttaccaaagtagatgttttctaggtgagggtggtcaaggatatatcattccactggggtttggacttatctttcctgttttaataaaaaaatcagttctttagcataaatataaatattttaagcagatcagcttctagaaccacagaattcaaacttgactaaaacaaaatacaaaagtctcttaatttatacaaacataataaacatgatactcagaaggaaacggatcagtttttctgtgttatacaatatataagttgaaaagtggttttgaacagatgatataaacaaaggtgaaaaggcagtaatcagtcaagagggaggaagtggggaggggcctgtgaaagtgaaaactctagtaagtctgtcttgtggcagatattacagttcttgttaaataatatgaaattacacacagttctcgctcattcatgaatttctgaatttttatgcgtacatcatggagtgattcttttgtaaaatgggactgattgtaatattgaagatattcctaggagcttttcccaacctaaacctttctccttcagtctcctgtaatccaacccataggccttttcctgttagtgttattaacaaaggagagctctaggaactttgaaaagagtaggcacagtgaagtgttgatatgattattttacacttaattggggttcttgaaaattcaaacagttttcacaggctaaaatttaaacactgacttcttttgggggttgattggctgtatatttttagagaagcaagcttttggattctgatccttaggtccaacctgtttctgtgtaggaaggggaactaacattacagtcgtcttacatgttagtgtctgtatctgtaaaaccttttactcagagtgagcttgtgaggaccagtatataaaagaaagaagcatggagagacaaaatggtctttctaaagagctcatagtggagggacactggaaaaattgttattttcatactttaaaggcttttgccttataatgaaatcattttataataattttattcctttgctctcctcatatttagtgaacccataatactagactgattttttttgctagatatgtaaaaatgcctaattagtagaggtcaacaacctcaactttgatttctgagtacatttggctagttcattggttgtttgctgtttgtttttttttaagcaggctagctaatgccaaggtttgtgcttaggacaagaggagattcactgcattgtttgagaattagcatggcaagaattaatgaatttcttattattgacacctttgaatatatttattaagtattatggtttaactattaatttaccagagttatacagtatttactatttgctagtggtatgcagtgttaatggttcctttccccactggtgattacattccatgattcattgagtgggacagtttaggatggaaataaacctgtaaggtaatttactgtttgttgtacactaaatggagttggatagaaggaagaggacaatagctgttaactgtgctggaatgacagacaaaaagtgattgtatcttaaattgtattttctttatcttactaattttaaaattatcatacaaaacaatgggtttcgttttagtgtcttgcttctttggtgtgcagaagctttttaacttgttgtaatatcatttgtcagttcttagtgatgatgatgttgaggtcttttatctccttgttatgtttattactagttatttaattgtttttgaaacttctgtgaatgggatcattttcctgatttctttttcaacatcatgttcattattagtatgtaaaaaatgatgttttttgtactgcttatttgttgaaactgtttatgagatcagcatctttagtgtgtttaaagtacagggttttatcatctgcaaatagggatactctgagtttttcctttcctctttgtgtgtctcttatttctcttgccttgcttctttggctgagatgttaaaatattgtactgagtaagtgtggggagagtggatagatacccttgtcttggtcctgattttagaagaaatacttgcatttcacctctgacccccgtttggtgtaatgttggctgtatatactctttattatgttaagaggtatattcttgctattcctgatttccttgggtatttttattataaaatgatattaagtgacgtgccttttctgtattgagatgatcatgtgatttttgtgagctgtgtaagacctattttattgatttgtgtattttgaaccatccatactccttggcatgaaccttcttatagtttgcgtgtgagcttagcctttaacagctcagctattcctccagcccaggaatgaaaccttcttgattttagtagagaattttgaaactgtattgaaaatttttatgcctatattcatttagaaaaatttagtctgtgttaggggcacagaggtccttgtactcacacagaaagcagagaaccaggaatgaatgttagtcatgcaggggtgcctctacaattgaggagataaacatcaaatacctgcattccatccagaaagctgtgagtggaggttgctaacaacctggtgacctttttgctgtctgaaaggacagaaattcaccagaatgattattccagattcttccctttctacaccattacccgtccttaggggagatgtcccatgtgctctatggcctgctgacctctatgctattagtcagagacagcaatagattctaggccttttagctatagaatccaccttgtggtcacatgtactttgtaaaggagtctctgggtaatcacaccttaagctttattgtgcacttggaattgactgattgttgcctggaaatgttttcccaaattatattgtgttttaagtatactgacaatgagctgcctggcattaggcttcccaaagtcaatctgtactaggttttcattcttatctcttcatgcggtttgcctccctgtatgaaaactacagggaccaacctcaagtctgtaattttctgtttttgttctgttcttctctggcctggatgagtggtaccattctccatttagttttagggacagtttgaggagaatttgatgttagttctttgaaggtctgactaattgacaacaaatccatctagtactggacttttcttttttgggagacattatccatctaattccttattacagatttatttaagttgtttacattttcctggtttaattttgatagatcatacatatctagaaatttctcttgtttttttttctagattttacaattttggaaatatgtacaattttgaactatttcctaaagaaccttaagacttaatttcatcttgtaatatattctcactattgattttatttgggtcttcttcaattgttttggctagaggtttatagatctcaaatgttttagtaagttgtattttcattttattctgtttttattttaatttcttccccgattttaatatgatttattgatcagtcagaactgtattatttaatctccatatatttctatagcttctttctgatttctagttttattccattgtgatctgatgacacaagaaaatatatatttatttgttgagagatttgtttcatagcctaagatatagagaaaggttaatgggcttctgagagaaaatatactcagtaattgttggatagaatgtcctatagatgtcatctaagaccatttgatctcaaggtccacctctgcccccagcacgaaggttccaggtatgggttgtcatgctcagttttttatatgggtggtagagattcaagctcagatcattacgcttgcatagcaaacacttagccaccaagccatctttccagcttctttatctcttttgactaattttgaggtaacctttgtcagttatgaggatagttacccttgcttgttgtcagcttccaatggcttgatatattgatatctgttcttctaccttcactctgtatttctttaccagtgaattatgattattttaaacaataaacagacatggtttaaaaatattttatttttaattatttgatttattattattattattattattattattattattattattattattatttgtgtgtgtgtgtatgtgccacataccagtggcgtcagaggacaggatgtggcagttggttctctccctctaccatatgagtcctgggtatcaaactcaattcatcaggcttagtggcaagaacctttacccactgagacatcttgttggcctggattttgtttttaatccagtgaactaatctgtttcttttgattgcagaaacaagcaccacttacttacctaagggttattattgatagaggtttgtcaattccttcagtttttttcctacttagttttgtggtgatattttatgatttaacaaataaagcttgcctaaagatcataaaagctgaatacacacacacacacacacacacacacacacacacacacacactcactctctctctctctctctctctctctctctctctctctctctctcggcttttagaatatctgttaaaaagttgatgttattctcatgtacttgccttcataattgagtttatatttttctgtttcaccttttcatattgtttcttggctctaaatgcttgggattttaactatagtgtgttttggagacattctttagttctagtcatatatcttgagggttataaagcttcttgggcttagatggccatttctgtccctagacttggggaaatttctgttaaaaatctcaccgaagagattttttaaaaagatacatttagttttaaattttaactcttcctgtaattctgtagattcttaggtgaagtttgctctgtctttttttttttttttttttttttttttttgcttgcacatttgaatgttttggtgtttgatctttttaattgtttttgaattaattcattttgaggattgtgattttttggcatcattttgccttgtttttccatgtttcttgtgattctgtgtgggaattttcacatctattgggatgggaatgctcagtttttattctgagggttcttgctgggcaaacatcttttggggccttagtcccttgtagcaatcacacacagatgagaaaacagtttgtgaaagcggtaacaccaaaccaaaacagatgcacaaataaaagctgacttctatgcaaccaatgcccactgaaaaaacaaaaacaaacaaaaaaccccagttaaaaaatgtaggataaggcatgcagttgatgaaaaagacacagcaaggtcatgcaagagaaagggaaaaataattgaagaatcttagatggttaaaaaaaaaaaaagggtattggcataaaaaaaccaacaacaaaaaaccaattgtccagtaaagtaaacacaagcaacaacaaatgttaacaaagttagaagaacataggaataaaaaacaaacaaaaaacaaggtaataatggctctaaatagtagttttaaaaaatgtgtgttgggtgggcaggggtagtggtacacaaccaatcactattcctttttgttcctcttaatattggagtctagtctgtcaggtagatggggcatattgtcagttaagattggactctcttctccttcatctgttcaggtttatgctgatcttggaccagtaaagggtcagttgttctgcagagcagtattcattctatttactgtgccaagagctgcttgccttatcttgctttggagcttgtggactatacatattctttctcactgcaaatgttccctagtttgtacactctaaggtgtttaatgttcaaacaaatcctctagtgcattggagagtgtgggaaaccggcagagatcttaaacacctgtattggatgcctggcttcagggctttcagatcacacccagcattaaacgttttgagggaggagacaatggaaatcaagttctctgctggatatggacgccagagttcttagtcctgctggtagctaatgttacatgacagaggcagctatctaggttgttagtttctagtttgatgtagtttactctaccttgcccctcacagctggagactcttgttgcctgaactcagtgtgaggccacctggccctcctcctctccaggactgactcatccatataaccaaagcaagaagtggcaggttccttgacttgtaagagatgaatgttttccgttccccgagatagcccaatctcaaacggtaggtaccgaagcatggtgacacctggctatggtcctctgagacatagggagtaataaaatggatcctttttccagagctgacctgctatagtgaagacattactacatcaaccaccccactgggatttaagccttgtgagaactgtgggtttattttaaggacagggatgccagcctccctcatttaggtagtcacttgtaggcagcttctttgtattttgctttattactctgaacttacatgtctttgatcttaagaacatttatagtctgtgttcatattacattaacacatagtatatttcactcactgtgttaaagttgaacactcactttctgtttttctctaaatcatacattcatatattatcatgcttatttcactattcctaatacattataggtttctctttcttaaaaaaaaaagaatctcctttctgtcttttgttctctctacataccagctcttgtatgactctggtctttagaatcatgcagacccaatttctgttttctttaaagcacttagtgataagtgatgcattgtagttgtgggaaatgtggaagagaacagtactagaactagacaacagattgtgttaccattttctattgttacacaaatggttttcttctatttggagtaatctgaagaccaaaagaaaaactcgctaggttattaactgaaaatgaagttagagaagagttatgtgtcattattttgtggaccaatgtgattttaaggattttttgcctgttataaaagtccaacataactgagctttcctatatacatacctatgcctgcttttcacatacatgcatattttcacatagatacattgtggatgctaaagcagttttatttgaaaaacactgaattcatgtaaaggaaattttcaaaaatagtttattgatttccagggtctgaggggaaaaacaaatgggaatgactaataaagagattcagtgtttctttttgagatgatgaaaagttctgaaattaatggtggtaattacacacccttggaaatatattaaaaatcatgtattctttaaagtgatatttgagaaatgtaaattggttctgaatttaaacagtgatttggaacttaacccagaagaactatttatagtagacttgtaatagaaacagttctgtatgaagatacagactgacattctactctacagttgggattggaaacataggtaatatttaagcagaaactgcaaggatgatttggagtaactcaggtgaaataactagtagcaatgaaaatgaggaaatagggaagaatgtgtcaattacagttaccatctaaaatgcaatttcagctctgacaggtacttcatttttgtcactatattaaatgtaaagtctttgtttaggtaatgtatcctataggccagtggttcttaacccgtgtgtcatgggtggcaactgatcctttcactgatattacttaagaccatcagaaaacacaggtacttacattatagctcataacagtagcaaaattacagttatgaaatagcagtgaaaataattttgtggtcaagagtctccacaacataaggaactgtattaaagggttgcattaggaaggttgagaaccactgctatatagacagtcaaacaaaaatgtttattataaaatacatcttaatttttctagggaagagagatcttttatatttcatggttagattatgactattttttatatttcagagtatggtattttataatttaaatatttcaggaaactagaattaaattctagcaattgtttatgagacttttttttccctctgcttatatattttataagccaagtttccagcttcttactatgtaaagattctggtgttgattccttttgacagtctgaggttaataattgaagaaacttacaaggcattttctgttgtatcagctgttaggttgaaaacccatttattaagaaaacttccaaggggttggagatacagctcagtggttaagaacactcactgctcttccgaatctcctcaattcctagcacccacatggcagcttacaactgtctgatgctgtcttttggtgtgctgatgtacatgaagacagagtactcatatccataaaatacatgaatacatagaataaaatgctctttataaaaatatatgaaataataaaaatattcaaaataccacattatagcttttgactggagagactgtaaaatttggcagtccatattcataaattttagtaaattgccactttggctgttgaataagttaaaaaaagagaaaaaattcaaataagtaccggaggaagaaggacagtagaactgacacccatgcaatcattaccagtctgaacacttttttagttcatggtcattcttattttatctctataatttcttactactttgttcttttactcatatttcatggaaattttatttctctttaaatgacaagaattctttaaaaatatgctatattggtcactttaaatgaagcattaaaaaactattggtaaaagtgaagtttttcattagtgaactcctaatttatatatatatatatatatgtatatatatatacatatatatatttctcaaaataaatattaagtatgtttatagaataaatttttatataacatcaatcataaactaaatcaatgttagaagaaaatagtttgtgtattattagtccaaatactcatatttatagttaataatgattcactaggacttgattatagtcagactttttttgttgggattgttggctatcagtaatgacacggagactcattattaattatgaaagctctgctgatagcttaggcttgtttctagctagctcttataacttaaattaacccatttttattcatgtatgtgttgccacatgacttgtggcttttacctctcctcctgcctgtctgttccctctgagtccactggcaactctgcctttcttcttcttagggcactctctgcccagaaaatcctgccttgctactggcctttcagctttttattaaatcaatcagagtgacacatcctcacagtatacaaaaagattattccacaacacttgatttttaccaatgatttggttacctgttccctattgaagtgtatagcttacttgatttccctaatgttttactttccagatgctttttccagatgttttactttccactctttattagagtgctgttttgctgactttctttatacctgtacgatatgcaggtagcccttccttagttagttcttgagcttcttggctctctgtaaatttttggctttgctgctattttgactatatattttgtctgaatcggtgagttgcaactgtttcttaacatgcactattacagccaaatacctgaagtacttacaaagagaaaggacttactttgagtccccatacaggaagaaagttatagtctgagattgggtaacaacatcagtttgggcttctgatgagggtggcatttatgatgaaggaagtctgacagagcatattgtgtacctggaaacagtgagagtgtgaccagaattccacaatcttctgtgagaacacatctcccactgaccaaaggactttttattaagttcctaaaacttggtagcagttaccagtagtgccacctggggaccaaccctataaacatggtctttagtggcattcagtaatcaaactatagttaccaatggagaaggggacttctctgaggattctagtttcatatttaaaacttgttcatggatgtctcattgccaccctaaatttacatcctcagagcacagcctgtcttctttttggttacaactattctcttctatctttcctttgacaaatcactagggttcttcaggttactatgctagaaatacccggagcttttgccttctctgcaaatgatattcttttgtgccttcacttcttcaaaatatgtgttaatttgactagttcctaggatttctttcctccccaaggaagcttataatctatggttagttgtatctcctctgtgtttctgtaaacccttgcattttctgtagtcaagatataagccagatactcagttgtaactcagctactcactaaatttgaacggttgcttgttttctaccttagttaagaacagtacacatgccaggcgttggtggcacacacctttagtcccagccctcgggaggcagaggcaggtggatctctgtgagttcgaggccagcctggtctccagagcgagtgccaggatagactccaaagctacacagagaaaccctgtctcgaaaagcacacacacacacacaaaaaacaaacaaacaaaaaaaagaaaagaaaaagaacagtacacatacacataatacagttcacatttatgaactgtaaattttgattctgttatattgatagctgctatactgatacttctgaagtagcaactttgctgatggaaaatataatcatatttattctttgcaagacttgatagggttaggtatttcaaggagaaataaggtatcatttttaggtatataagtggtttgcctgcgtgtatatacatgtatacagtatactgtgtgcatgcagtgtcctcagtggctagagggagggtattagatctggagcttgagttagggacagttgtaagctaccatgtaggtgctgggaacagaactcaggtcctctgcaagagtagtgtgtgctcttaattgctgagctatctatctctctagaccctcatagccccatttctgtatttaaaagatgtgattaggaaatataaacaggcagacatctttggcttcttgtacaggccattggaagcttcctgggagatgtctgatgtctctaaagttctttttaaaattttaatttgaaaaaaattatttactgtatatgtatatgtatgtatatgtatattgtagtgtgcatgtaaagaacacaggacaactagtgggaataggttctctgtttccaccatgtggatcctggggggtggaatttaggctgtccagcttggctcaggtgttgttatacccccaaccagcttgctggtcctctaggggtattttccattagaaaaatagtataagtcaggggtgcctttacctgggtagctataaagaggaagagtgagagttatcagcatggaattgactagtcatgagactgccttcattctgattaatttaaacatttacttcagttagtgtagtaaaatttaattctaatactttttgaagtagaaattatttttagattattactttgctgcctgaagtggttgagttatattctgtgtggcctcatagaagctagggcaaactttgttgtctatgatcttcaatttaaaggaatcagtggctgttagcagttagcactactaatattctatataatgtattacttactgtaagagcaaggatttgtgtaactcattcattgctcatatttgctgacagagaaaattgtttacctgaaagtccagcaaacagtgagaatgtgactagaattgcacaatttacttattttccggaatgaacacataagaaacaattggtagacataacaaggtattttaaatacattggtggaaataaaagctagtttacatgtttgaaggtaggctaactttggtttaggatcaaacaggatggagtttttttagtttgatggttgatgggtatttatgaaaaattttttctttgttactttcagttcttcctatcactgttagtttataaagtctttaacataccttgtagatattatgggatttttaaatataaattttataatcattgagttcattattactataagccaccaatttttttttgttttgtttttagagaacatgaacattgctggttattttcttctctactacagctgtaaaatgatggtttttaaacgttagttttattttgtaaaatcaccaagcaaatatgtgccaagaataaataaaagtgtaaatgaatttacattattcaaaattctagaattagacatctgtctaatgaatgctgttctaaatgttgctaaatgattaatagtaattaaaaggttaaatacaagctgaagaaagctttgaattttgaaatgtttgcaacagctagtaatctgactgatgcagacgtttttgtcaaagttgaaaaagttagagctaattaatttcttgggagacatatgatgaaattgtaggtgtgataacatatttgagtaacatatggtggttatgggcacctttctaatgactgaacagccagttaaatatagactttccagtttcttttctttcatttccattctttgttactatgtattttgaactaattttgttctagaggtcagtactcaggatttaacaacttgtatttaaaatgttaatatgaaggagcatgcagtcttcttctcaatgggcatacattttaatcagttttcttaaaaatatagccatttaccccaacatgtgtgtattttagttaatggtattatatattaatcatatgattggaaaactgtactgacagtccatactacttcattctgatcatctttgattgaggactaaaaatgttaccattgatacacagcatagatgcatttctcttttttaagttaactatttatctcttgagtatagtaatttcatttttataccctttaaacaagaatataaggtcttgaatattgcttgataaatcagatttgggtattgaagttttctttttggcatttgtttattgaaatgccagtctattatgtttatattttgatgaaagatttttgaaataaggctttcacagttatagtcaacacagcatagtgacatatattttaattttaaaggctgtatttttacccaaatgttacatttgtaaagaggcatacttgtgaattttctgttattcaattatcagtgaaataagagttacaggtgtaagaagtttggatgtgtggctatcaaaggttgttcgtgttaacttcttaatattctgctgatatggttaatgaaatggaaaatgaagggaaagttacacatttccaagtccttttgtagaattttctctaaaataaaagtaaatggaaatgaaatataattttaaactttaaaggaagatgatgggtaaattctagaattgtttaacacatataaaacaattcttctttttgctcagacacattcattaactattaatgcattttaaaaggttcttaatatatttgcaaatagttagaaattctaatcaagtttagaagtgctccaaattggtgtacttgtctttgtatccccacaattgtttttgtttaaattgaatattctatcaagaagtttggtataaacatctattgtacaagtccttcttattccaagcctgttgcaagatttcccctgttagtttacatgcttttagtcagtaaggggctggtgaaatattttatcctgagcacagtgtaaactcaggtcttcaggtagcaacatggtaaacattcagatgagtcacagtaaaacatttgcattagtcacttatgatacaatttgtaaaatttggattgtctcttaatatctgtgaaccctcagttttaaatataacagaattctctgaagtaatggattaccagttcaaaaaatagctttggaggcttattcttaagttgtaaatttgaaataatttaaaattggtgatgttgataaacttaagaaataaaaatcttgaacaggcttatttactttgtaaaacttaagagtttcagtagagcaaaatgattagaacttagtttccattatcaagctataagttgggtcatttgttcttggagtattaagtacacaatccatatggtttaattttgagttggttttatatttgagtttactggagattttgtttgtttttataagttgttaacctattttctgctctgttaagtctggcttatttcataagttagtaaatgacagaaatcagatctataaccaacattaaaaatatcactgtaaaatacttggccttattcccccaaagctaagattaattctggaaatgtttctgaaacagtgaataaatgattttggaatatttaaaagattgtatatcagtctttaccttccattcatgatttacattgtcagatgggccaagagtagtgttctcagattttctgaaattccttagtaagtcttgaagtctgaacatagggcttgaaaataaaaagaaggttttgagagcaagtgtacttgattatcttactaatagcacgtagaagtctatttcccatggggcatgacacaccctgtcacccagaaacagtttgttggatgcttttacagccatttgtagagagaagatcattgcttgtgtatcagtccaggtataagagataattctgacgtcattcttctaaataccttgcaatacaattgcatggatattaacttggtcggatcattacaaatgagtcagtaaccttgttcaaggccagcctggactacagagtaaattccaggacaagcttcaaagcaacatagagaaaccctgtcttgaacccccacccccccaaaaaattttgtaaactcactatgattttaatatttgtggttgacatgaaaatatttaagaacagatgatccacagtctagtctgagaataaattattatttttcccctgtaggaatgaaagattaattttaataaaccgtattgtaactctgatttcacatgatttaaaatacacgatttaaaatacacgccaaagtgtctcaaaattcagatttgttgtgaagatactaaacttaagaatattttagagtattcttcagaaatacatgagtgattaaatttttttcatttatagttgccagttattctgaaagaaaaataaagttgactgtaagaaaatttctgagagtcataatttcttctttttctcttcctccattttttgagaccaggtcttaatgtatccctggctaattttgaacttgctatgtagaccaggctggccttggaaacatagatatatatccatctctgcctcccgagttctgggtttaaagatacaaaccaccatacccaactctagtccttatttcttaagggctctgagattggtgcaaaagtcagtagttgagttaacaagagagactccaagataaattaaaattctgttgacttgctttaaggaaataatacttgctactttcctaaaatgccttcataatgtattcctttaagtatatttctgttgttttcctaaggaaatttaatatctttaagctaatagatacctcttcctagctagcacttagtttttaattatgtatcaggcagagatatgtgctttgcgtgacattgtatttaaatgattaagtggggtcatggttgtatatgtatgtactgtttttattattattattatcaagtcactaaagtcttagatttgtgtgaaaagttatttctttactttgtatatttgaatattattttcaagtagagagttttatgtcaggctttattctgttgtactcacccaagatgtcattcttctgtctttgagtttctattgtaactactaagacatttattagctgttgagtatatcctgtgtttgggaagtaatattcctattccttaactctttaggatcttctttgctttttaaaacttggaagtgtatgtgtattttggtttctttttccttttaattttatccaggcaccatattgattggtgatttttatagatatctttcatcagtctaggaaattcttagccactaactcctctgaccagtgttctttctgatcttgtataatggcagttaaaaactggaaaaatcttttgtgtatgtaatttacatcttatgacctactatttactattgtccatctagttttgaaggtatttttttgtacttagtagttttctctttttcttgttgtctgatatggtactacatttttctgtcaattcttttcgtttctgtttttgagttctcaaataccctttcctctttcatattactcatttatttatttgaatttgttgtttatgggttcatagtgtacaagagaaattcaaggacaatttttggtagtaagagggtgtgttctctcctgccaccttgtgggttctaaagatctgactaaggtcttcagtctgcaccaaagtgcctctacctgccgagctctcttggtcctcgagttatttagacagttttctattttactcctgaaaactccaagtttggcctttatcttctttagcataacgcattgtaaacttataatctgtctgataacctttaacatctgaaatccctgaaggtgcatttttttttatggtttgttatttttgttttattttgcttctggaatctcctaaggtaccattggtaaatgactcagattcttgttattcatggtagccatgttattaaaaactccccatgcacactgaattgttgcttttggaaggaagtttagaagcacgttccttcaaacttgtgcctacatttttgagggctgatcatatataatattgttacacttttgtttcttcctaaagacttgttatttaataagtattatttctacaacattgaatttataatcaccaatttgttgagtcttgactgaagcttatttaaagagcaggcatttcataatagctttcttgcacagagaaacagtatcagtacttatatgtagggactattttaaacaataaagtcattaagagaaagcaaaactgtgaagagtgttgcactaactataccccatgacattgtttatagtgagtgaaagcaacaagacagtgaaatcttgtttactcacatctgtaaacataggcattattaggtgttcagattatttactctttcatatgtaacaggtgactatcagaataactggagtgttaactgaaatttgggttaaaacttttttaatgaataggtgactttgcaaatacggaatcctagaaagaacagcatttctgctagacatgataatagaaaatcacatgtagatttttatgctttgaggaaagtaaccccccttccgaccccacctgaaaagaggcttgattttatatctgtcagatagcatgtaggcattaaaattctggaaacaggagctgagggtgttaggtaggttggtaaagtacttgccttgcaagcatgaagacttgagttctacctttagaacccatgtaaaaagactgtgtttgatggtattcccttgtaataacaaatgttaggtaagcagacgcaggacagtctctggatcttgcctaatttatgagcttcaggccaatgggagaccctttctcaagggaggtggagagtgctccttagaaaaattttcagggttgtcctctgttgtgggaacattcattcagccgtctttgagggcagagtctcaggtgcttaaggtagactgggaacaagctttcttgctcttttggaaggtgatctgagacctgctttgcagtgtccagcacctccagggcagaaaacctcagtggctctttagctttattgggtgtgtgccttttctctatcctaagagtagaacacttaatattcatgtggataacaaatggggaaagtcgatttatcatagaacttatttaattaaaagtcttaactgttaattcacaaagcacaaatgaaaaacaattttctttttaatttatatttttgaataatttccaattacagataagttataagaatgatgtcttttttcctccatgagtaaatgctgttactcttcctttttttttttttttttttttttttttttttttttttttttcaaggaagacaattctttttataggagtactaatactgagtcagaaatcaatactgataacttgagtcactacaattgactcattataccccaatcagatcttttagtattttttattgcagaattttaatcaaaatacatacattgattgttaagacttgttagttgttttcatctagaatggctccagaggtttctttatgatcttgatcctttttcaagaccccatactaacttcattgaatgactgcattttggggtttgtttggtgtttcctcatgatgagatgtggattgtatatttggatagcattatcacagacttgattgtgacaggtctttttttttttggaccatcagctaccaagtaatgacatggagacttaatagtatgaaaacttggccttggattagacttgttaccaactagctcttataatttaaattaacccgtttgtattaatctaccttctgccacatggttcattacctttctaccatactgtatttcccactttctttgtgtctggctggtgaattctgcctctctgattccttctcagagtttctatctctgcctggaaatcccgcctaccatctcctgcctagccattgactgtttagttctttattaaaccaatcaaaaggtgccttgtccgagacacatcttcactgggtaagaaaatattatcccacatcatttgatgctttatttatgctttttctttcttttttttttacttatatatttatttgaaacaagttttgttatgtagcccacattggcattgaacttggtcctcctaaccaaacatcttcattgctagaattttaggtatttatttccaaattcaacagtaattctctttttaaatttttactatttttttatttgaattagaaacaagattgttttacatgtcaattccagttctctctccctcccttcctcccctacaaccctcccaactaaaaccctacctatcacatatcctttctcaacagtaattcttaactacgggtattttgatgtgcagacttttgcatgcctggctaacaggattcatgtggtttaatatgtctctatagttctttgaacaactgtctggtacagttctatgttataaaatctctgcctggactctggaatcagaatcagttgttttccagggaatatgttgggtcttttcctttgcttttgtttgttttgctttggtatagaaagatatttagaaccccaaattggatattagatcattgtattggatgtcagtgttctttgcctcttaaagtaagttagaaaattatatacatttatattctagttctacacctgtaattgaaaacttagcattgatttttcaatttctgacttacagtgaacattttttcagatttcccccatctacatttgtagcttggagcaagaaactgagatccatttttctgtaattaatccatagttagtgtttggtatatgatcgggctcttatttgtgctagaaacgttttttaacacttttggtcttatctaatgtcttcaggaagacaagaagtggcttcacaggtatattgcatgggaattttaaagttgttttaatgttttactaaggagtgatctttgataatctgggcagtcttggccttgtattctggtctttatgataaaattatcatgatttgttgcatctagtacatgttctatgtgtaaaacaatttagggactcctaagctttttctttgtgatttgatttaaatttttgttagcggagaacatggtttagatgaagctcatttattcagtagtcttgacattttaagaactaatctatgtcaaaactttaggccccttatatctagtcttctatgtgggtttgaaaatgtgactaaagaccaacaagtaacaaaaagtttgagaagaactaataaagcattttcagtgatgcatttatccactgtttcatacacattaaacttgtagcaagctttcttggaccagcagcctccaaatcatgacatggacacttactattaattatgaatactcaccttagcttagacttgtttccagctagcttttaaaacttaatttaacctgtttttattaatctacattctgccctgaggcttctttaccccctctgcccatcctgctttcctgcttcctccatgtctccctggttgggcctggctggctgatcttgccctgcccttttctctctgcccaccagctctctgcctttccctcctctacctatttgctgttcagctttttaatagacaaatcaggtgccttaggcaggcaaggtgaaacagcaacatatctttccctagttaaacaactgtatttcctttcttctaccttcccacttaggcctagatgtaagtctaacttagccaaccctcgtcacaacagttaactgagttaagtgaaagttttcacaactgtttagcgcataattcttggaacaaagcattcagactacccagaagccactagcaaattaaaggagcataggccacttacaaatctgtagagtaattctgttatttaaaaagttacatttttcatggttttggagaaataaaaagttggaaatgcaaaatctaagacttgtgtataatcaaaataatatttagaaaatgtggcaagtgattaatcctcaagatagaatcgttttatttatttttggaggaattattattaatttttttttttggtttttgagataggttttgtctgtgtaacagccatggctgtctttgaacttgttttgtagaccaggatggcctcaaattcacagggatctgcctgcctctcctgagtgctgtgattaaaggtgtgtgtcaccatgcctggcttaaaagaaataatttaacagatctattactatgtaaaatttaggtaatgaatatggatagtgtaaaatttacatagcatttatattgatcacaaaaggctgaattgagtgtcatcaatacaaatattgttcatttcagcatcaaagctgtttagaaggcactgtttatgattgctgtaattgattcattgttttaggacatttaaaatggctatgcaatatcactttaatgggtatacctttcaggtgcataaatgcatgattttgtatgtatacaacaggtttttctactttccagacctgttaataacttttgtctcagtggtgattattggtattgtacctgtattgtacaatactttcagccatgttaagtcaataaaaaaatacactctaacaagctatttcagacctatacatagcactaagccagctcagctgtgataggctagccagatatctgtcttttccctagagctaacactattcgatggactaagaacaaaaagaaaaaagcaggaaaaaaaccccatcattatttaaaacacaaatatacttctgtctgttcccacaagagacaggagactattacatacccaaaatttagactttgtattaagatatttgtgttataatacaaataaagtatatttgtattatatattcaactctttatataaaatattgagtttcttaccatattactcatgtagactttcttaattatcagaatttggtaataatgactactttatcattttcttgaactatgaataggattttgcataccttaacacttaccatttatctagtggtcagtgtatacattcgatatttaaaatgtgatcgttgagattctgtgtttataatattttgaaagtcttacctgcttttcataacttttttttcttttaaaaggaggtacttaaatttttttttaaaagaaccgagttttgtagaaagtaaatgagacttgtagaagttcagtttttgacaagtaagattggctgggtacctcagacatgagtgatttcttttgcaaagtattgtctctgtttatagcctaatgggtcaataccaacaaacagctaaaatagttcacttaaaagtttttttgagacaggttttatctgtgtattcctggctgtcctgggactcactgtaggccaggctgaccttgaactcagagatcagcatctctgcctcctgattgctgggattaaaggagtgagcatgcttgcctgcaccctgtgcactgattgcctggatctggagttagagatggccgtgagcctcctcgtgggtgctgagaatcaaacctgggtctttttcaagagcatccatctctccagcctttgattcttttttcaacacatgattttgtcatttcagtgaattagcttgtttttaaggctatagtaaattgctataattacagcatttactaacaaccgtactgtatagagtagttcaaactcagaggattttgcagaactatccagaaaaggaatacaaagacactaagcttgttgtgcttctaaaatagtgtgtgtgtgtgtgtgtgtgtgtgtgtgtgtgtgtgtaggagagcttagggaggtaataagaggagaaacaataagttgtagactatatatttgttctaaacatacaagcaaattaattgccacttactaaatgagctactttcttcacagacaaggctccacctctattttactgaagtgtgtatggatactgtatttgattcaggctgtgtaagaagagggccgaggagtttgaaagaagctagaaagagcataaaagaatcactgtgctctttcaaggccaagggaaagagacattttctcattttgagaatgcaaagagaacactaatgataaagtcattgatcatgtctaagcaattattgttaagtaaaattgtaaggatagaaagcaaaatggagttcagaaaagaaggactattaaagaaattgaaaaagagcagtcttttagttgtttttagtaaaaggaaagaaaatagattgcagtatgtcaggaaagatcttttgaggtagaaacatgttaaacctgtttgtagattgtagtgaagtcattcaaacttggagggaaattctgaagattcaagaaagaattaacagacattactaagcattggagaaagaacagaaatggtacttgtaaagggagctagcccttgaaacagttggtcatgtttctctgacatagggaaaggatatgcgttctgaatagactttccaagggcaagctgaaactttgaaccctgaagttttagtcatttagttgtcccttgtctcttaatagataggtaagaaggatggggtgtggggggagaagattttgaatagataatggatagtgtggtatcatactttgggtaataatcatatagttaactagaaatgataaacaatttcccaggtttgccggaattaaagtggactaatttgacttaggtctcatgacctactatatttaccctcagaagaaataaacagaaagcagtttatgaaatagggtagagaatgataaaatgtatacagtgaaagaaaaagtaaatgagaaaaatacggattagtcttagattctgtacagaactaggtaaatgaaatagaacttaaggcttgggaaaatagggagaaaacaggagtagaggtgctgaggaaatgaagcagaggttcgagtacacgaaggaataggaatgttagcttaaaatatcatagtagaatatatgttgaacagtattgctctaggtactgttcatttgtatctacaagtatttcagtaacaactgccaacttgccactagatgtcactctgactcgtatggtaagtctgtctttggctcaagattcagtcagcctagtacagtatatcctgataaatagcctggtgatcttaagagcctgttctagtcagtttttcatgcaggttgttttagttgtacagctgctttggagaggataacttctttagaacaaaaccaaaccattaaatttgccttaatgttggctgttttttttttcttttgttttcctgtattaatcacattaagtaattttttgggggggtgctatacactttaaaaagtttaaaatttttctgaaattatgcatcagaatttttaaagatattttcttgccttaatattgttttaattactttgtctgctgaattggtcctggctttacgtgtactaacagctttttattggtactaacaaaagtatttctttttaagtggtcaagattatgcatgttgacaccaaatctgtgaatgtaaagtttttacttgcaattttctaggagtacaaaatagtaattactctaggagtcatatttaggacacaatatcagatttgttgcctatacacaatttttttttcatttgcttctttcagagtctctgaactacttggaaagctttgcaatatgattattttaaaaacataaaatcatataaaaacaaatatttagatattcccagaatcatatataaacagttcaggtatatgatatgttataaaatacatttactaaatttataacatttagtttgcattcttactggtttatttttttctttaatagagaatagttgtgaaattgtattgcactactagaattgttgaattgcagatcatatggtacaaggtataatgtccgaggtttttgcctgtgatttgcctaatgatctagtccagtgttttcttatagttctctttttattggtatcttatttaacttgtgacccattattatgtcaaataatttttagccatgttggcaaaactgcaattctaaaattgtaagtaagccatcttatactaccccttttaaattttggtagatttaatcttcttagtgctcctgacataataccttttcatttggaaaagtacctgttagtttaatctacataaaatgtatgttagtcaggaaatccatttgcaccaaatacagagactagtaagacacggggaaggaaaaaataccttctttagagtaactagagatagactaaagaaagccttgatatttgacacaaaactgcttatgatactcactcactgattaggaacttacttgcaaattgtgttttaggactaaattataggtaatagtttagtctgcaatcaatatatgtgtatattatgttctatgaagatatcttctttagtctctcattttccttgggttggtgggaattaatttgcttttggacagattgtgaacttgttgcatttactgagctgtgcttgagcaacagaacagaaccagtgagacttcccagcagcacaccttaattccactactacaaaaggacatggaagcagtgactgtgaattacagattctgatattttatgaagcatttcatataacagtactcagtattgataagtatgatgtgaaagtactttttaaattaaggaattacttttgaaattattttaatgtctctttttatcttcaaatgcactttgtcatgtaactttcaaaatgaccccctttttttccccacacaaggaaaaaaatacttgttttatttcttaggaactttacagtcaaactattatattttcctttatccactatatacccttgttgtaccaggcataaaaagttagataatactagctgtctatagccactatcacttaacttccaggggccttaacctccatcagaaacaaatgtagatttttgtttgtttgtttgtttgcgtgaaatggcttcctaggcatgtaaaaacccttttgacatcattatttagggtctcctctcctcccagtggaatcacagcctaacacaaaatctttgcagctggtgaactcccaaagccccctttgatgattgctgttaaactcagcatggcagcttgcagttgttcctggcttttaccggcctacccacctcacattcatgttcttcatgacaaagaattctccagaggcaaaacacaggccgagatttcagattcattctttgtctcctggtcttcttgattccttttcgctttaatattaagtatattcaccaagtttactggacacagtcaagggaaagatcacccccttcactgttatgataaacttctcttttcttacaaaaccagatctaactgttggctgctaagagttaaatatgcacaaatgctatggtatatcatctttatgtgtagactatgctagtttaaattagacccaagccagagtttcaatccacacttcagcctgtgacctagttcttcaaaatctgacatttcccatcttttatattatgttctctgtgaataaaaagtgaaagtatgtctaacacagataatgacaattaatgatcttgtaacttatcagtaaactgatttacaagttttcattttaactttaactagttctttttttttaaactaaatacaggcttggtttagtgttatttcgatgaaaaataatactgaagtataaatatggaatctattctatttaccagctaaatagaatatgatacattaattggtgttacagatgcttgcttaatataataatcgtatcttgagttaattgaattttaacatcaaaaacacagtacggtacacttctttatatagtaaaatttccattcttagagctaaggcttaagtggtaagaaggattgtttaaaaaagattaatattacctattgatggctagttttgtgaccctggaaggctagttacctgttgtttgttttgcttggtttgctgttttaaattggaagatcactaaaatctctacatgttttggtaacctgcattgtcttaaaataaagggtttttttttttttttttgtgtgtgtgtgtgtgtgtgtgtgtgtgtgtgtgtgtgtgtgtgtgtccttattttctgttttctcattgaaaatagattctttttcataccgtacattctgattgtggttcccctctcccagctctttccccccttcctatccattcatctctacacctgtcttgccttctcttattagaaaacaagcatctaaaaagagagaaaaataataaaataagacacaataaaaacacacctgaatagggcaaaacagagaagtgaagaaaaagtataagaaacacatagagacatagacacatgtattggcatcctctaaaaacacaaaattggaaaccatagtatatagcaaaagacccttagaaacaaatgccccaccaattatgcgactgaaaagcttccaaaaaataacacttgagataattttgtattggtcattgctgagtgtatagcctggccttgagagtggtttgtatactcagtgagacttcattagagaaaacttaatttttcatttgtgagtacttatcagttggagaagcttttggttaaagaagctgtgtccacttccactctcaccactgggaccccattaggccctgagcatcttcccacagtctctttgggttgtgtgcattggtactgctgtatttagaaggctttgtttccttggtgtcctccatcctctacagtctttctgtttcctttcatcagagttccctgaacctagagggaaggtacttgctgaagccatctcatttaggaatgagttttccaagtttttcaatctctgcaccctgctatgggcctttgatttattcccatatacttctggagaaagttctttggtgagagctgagcaagacattgatctataagtataacagaatatcattacgagttgttactttaagaacagtaatatttggttttctccttggtccttgacctatctactttcaggtccttggccactcaagcagtgtctgggatggttccatctcatggagaggtcgtaaaaccaatcagatagtggttggttatttccgtaagctttgtgctactatcccactaatatatcttgcatgcaggtcaccattgcagatcaaagggtttgtagctggtgtttatttttcccctttggtagcacgcagagtaccttccagttccatgaacattagtcagtagaagtgatggctctatgtaggcaccagctctccttcatgttcagtgagtttttaggtgtttttctgcaatagggcctttctattactttgtagagagcaaccaatagcttgacaatagcctaagttgtttagggttgtccatgggaccctttggccaaaaactcgattagatgtaacctattagtagacgtagtcacttcatttgttgataatagatgttaaattaggtctctgtctcccccattatctggtgaatccatttagatcaccttcttaagtgtatatattttaggaagcttctactatattaggttgccatacactctttcaaatggccctttgttttaagtgttccttcccatattccctcctgctccccatcttcccttccacttcctgtttcattctcccattccagtccctgtcccatctgtctgtaactatctccccttccttggtaatccacccccccctccccgaccagtcccttaggctataccttacctctgtggttatgtggattgtagcctgcttattgaagatggaacagctaacacccacacattaagcaaatacatgttatacttgtctttcataccttattttcctgaaggctgatgtggtgatattttgtttatgatataacaaataaagcttgcctgaagatcagagagcaaaactagcaacactagttagaaactaggcagtggtggcacacacctttaatcccagcactcaggagaaacagaggcagacagatctctgtgagttcaaggctaccctgggctacatgaaaatgatccagtctaaaagagaaatagctcacacaaaggtgatcccagcacttggagtgaaatgcctttaatcccatcactaaggaggtggagaaaggaaggaatatttcttgatggagagaggaatataaaaaggtaggaggagacaggagctcattgcagtcgaggcagtcagtctcaggattcatggagacaggactgcccatttggtctgaggtagaggaaagagctattggctgtggctggctgctttgattctctgatctttcacctcactaatatctggctctggatttttatttattaagaccagttaaaactcgtgcaacaggctgatgtgctctgtacgtacttttttcagaactgagaaacggtcaacaaaataattcaagaaatattaagagtcaaggtgtggcttggtggtacagtgcttcccaagaatgtccaaggccctgtgctccatcccaagcactgccatctccactgtaggatgaaggtggcaggaatgaaatagaaaacactgttacctgtgaaagaacatccttttgaggagttaataaagataaacttttgtatgagcaagaactcatgggaacagtcatcacaaataaggcattttagaccattttttttgtttctttgtttttgttttgaggtagtatcaccctatgtagttcaggattgccttgtacccagtattaccctgccttagtttcttaggaactgggattacaggtgtatatcccattgatactgtgtttttcatcctgaattccactgataactaataaaattgagtgtgtttgtattcatttggtacttaagagtgctgaaataattgtatgacaattgaaatatgtacatacatacatacatacatacatacatacatacatacctaccttgagctaggtatagctcagtggtagagtgttattagcatttgtgaggccttgggtttgatcccagtgttttacacacacacacacacacacacctctcatacctctcatgtttagaaagaatattttaaattagatattatgtaaaatatttgacacatattttttcctagacctgtagttgatgaatatgaaattctttggaaacttttcttaatgcaaatattctttaatatttcaaacaaaagtaatgtcaatgaatttcctcttggtggtactaagattagttattgatatatattatttgaagaaaagctaatgaagtgttttaaacaaatgtgttagcttttatcctcctaggaaagtataactagacatcaaggaaagtgtatttaaagttggtgtgcctaactaacttaatggcactggccatttacaaacttatgttttaacagagtttcagatttccttgagcagtcttgttgacctatgtttctggggtggaagctaaccttctcatgtgttatcttttctagcttctcacatagtacagcgtgaatgctatggccaagggtccatgaagcaaataccatgtggtactttggtctgtagctcttaaagctggtgtacctcctgcctaccctcttgacatagtgaacatataatactctacagcttgtatgtttaagctagtgtctaatagcagccattgctaagtgacttaatgtttcatttctttgaaacatttttttgtgaaaagatactctggaacccttgaatattttgtgcccaggatttcttgtaaacagagtactagcttcctttctttttaaagactagagagtttggagaatacgcttagaaagataagtagatttatgaaaatagtaaaaagtacaacacttttctttctatattatctaaagagaaatataaaatatggtatctgattattaaagattatatttaatctttctgaaatcccatagttttcataattatggtctttttaagtatgagtttcacttttaacttttttcagtttaggaagattatcggtcataggggtgcatgtagcatagactatagaggattataacttattaaattgtgtttggtaaatactttttgaatattgtgacctcagattactgcctaattggcatgaaaaatatttaagaaagggaagttcctttcatcttaaaatttctctttttagtactttctccaaaatattagtaattggaaaaaaaacccaaaacctaacagctttcatttgcagtttttcttatatttaattttgttctagaacaaaattacagaaccaaaaataaactgaattagtaataaagtaataagtagcttatgttgcattatgtctgctgtttgtattaaattacttaagaaactagaagaaaacatacaaatgtgagatttttaacattttaaataaatgatcttacatagggtaaaattggttaagaaattgaaataaacatggattatgtgatgaggattggggtactgggtggtggtagagtgtgtatttcgcatgtgtaatgtgtgagccccagaagttattttgtgaaatatgcaggacttccgactgtctattaaaagttggttgggtttgtaacttacttccctgtcattattaaatttatttatttgtgatttttgtttgtttgtttgagacaaggtctgactaggtagcccaggctggcctgaaactcaagattttcctctctccttgtaatgctcagattacaggtatgtgccactatacccagtttgagtgttatttttatagatagatatttatatgtgacagaattatcactagtaaaaattagtttggcgaacattagcatgagactaaagaagaatgtaccattgttgtgcctcgagtccagacccccaaagaccaccaagagaccagatctgatggaaaagcagagtctttttttattattataccagcatgctggagccatctaccctacacaaaagcaagttgagaaggaggtgggacttcttttaagccttactgaagggagtgtctaaggaagttaagtcagtttagttatgattggtttaaacaagtggcaatcatattagtatgttttaattggctggggctagtcaaggggtggtcagagctacagttttctatttttgggcaggcctggacaaatcccaggtcctgtgcttgagctgtggcctggcctggcctagtactttatgtaccaggcctccttgatgttggaggtgttggactttgattctcctttattcatagcttttcctcataaactgcttattcagtctcaggaaactgaaattgaggcctgatctctgagaggagactgggcagcctgtttggcatcttgtttttccattttcccttaataaatttgtggcataaattgatattattgtaaataggttatctctttgcatcttcctgaataatattgggttatctgttttgagggaaacacacagaagcataaaagaaacaaataacaatttcaaagacttgtaacatttctacagaaaacagatccatggtttcatgaaacagtggactgacatgaagttgtaagtctctgaagaactaggctggattttataacgctagttggatatattgtctgtcaggaccatggagttagatatgcgatgacgtgaacattagtgataccaattttcctgatgaagggctaacattggcttcaagaacacatttccatatacttcaaagcctgaacaagcatttgactgagactgcttctcttaaactttgtgtgttagagttcaataaatatgcatagaagttataaatagaggctgtatttggatgtctaaaagattgtctcctaattggccttctaaagacttagatacaatatgacgagcaaggatggaggccaaaatgcgtttgttcctccctgcagtggatgcctgagaaaagcatatagtctgaaatgctatttagttcatattttcccatacacctatttacctgacaaagtttaacttaaaattaagaatagtaaaaggtaaatgacaataacttaaacttgaccatttgtaataatacacagtgatatgtaaatatatggtgtctttctcttggttacatgtctatcactgttgttgtgataattgggatgtctctgtgatgagatggattaaagtaaaatgattattagagggatcatgacgcattaagctcctgaaggattacttgaacacaagcactgtgataccattgcagtacacaccttctgactcagacagctaccaagtacaggatggatatacagcgtggatacatgggcgaaaggatgattcacaccctgggtggttgaagcagatggtgcaagatctctcatcatgctaatcagaacagaacaaaatttatcaactctttatttctgtttgatatgccagactgttactgaccatgggcaactgaaactgcatcgaaagtgaaaccatgtgtaaggcatcagctgtactgtgatagcagtgaaattggaggtttttctgtgagagccaagtgacctgttgaattgcagaattaggcagactttctccagcatgtttcaggctgttcaagcaggataatagactagagcacagaggtctctgttggtaattatcttggcagatagtatagttttttaaaatgtaatagcagctactcatctctgtgaccattgtgcaagaaaatagtcacagataacatgtaaagtataggtgtgtctgtgttccaataaaattttgcttcttgctgttacctgtttccttccataaaggaaaatggaatatttgcattttctacaacccactactttcaaaaggaagaaaaggctctgaactgaattcttcatatgaagatatttcccccagaattatccatcagaattagaatagtaaagacataggaatctggaatggcatgattccttttactgaggaaatttctctgactatcaggagcactgccctttcagtggccttacaggactaggagcacagaatgttattttgtagtgtacatttcaactttgacttttgagttttaatactgcaatattttggcagtttcccttatatatagtttatttttagttaaatgatagtaaaaccatgtagtggactgtcagaaagaagttataaggatggaaaatggtgccttcaaactttaaaacagatttggagcatagtaaagaaatacacagtagggaaacagaaaatttaggcttgtagacaaaaagcagtgtaaattaattaattatcattgacaatgcttgtcttcctggcactgtggacacatcttcagcatactgaaagaagctcatatcctccttaagaataattcataattcctgagtacctataaaaaattttcccactttaatacaagcaagaatgtgagagcaggggcaacatagttcctgacctttagagatagctagtgtgttgtgtctctaagaagataaaaaggggtctctaaattgaaagttgaagaatgagctggtctgttgatgggaatgggcaacaggggagttgtgcagaaccaacagtaaaagaagggtcaggatggacagagctcatgatgaccctgatctggaagaagtattgtctagaaagggaatgtggagctagttgaggctgaaaaaggaagatcaatctagtcttaggagtcccttacaagtgtttgggttttgccaggagattaatggaaagtagtgaaaaggcttttaagttctaagataatgtgagactggtttagaagaggcatattgaagaacttacagctgtattattcagcaagatagtcctaaactaaatatagctgttgagttctcaaagtatggttggtatggctgagaagcaactttagattttatttttaaaattataattttaaaattagagcaaagttaaaatatgtttcaagtattttttgagtaggctcacatgtcccttaaagtgctgaaagctttcagtctgagttgagctatgttataagtagaaaaggtacaatggattttgaattcctaatacaaaaaagtaaaatatttttctatgagggcttggtgaagtcatattttggatgtatttaattaataaaatgccactcaagttaatctcacctgtttccttttgctagctcaaatatgtccagctttttagaaactttgacatttgtgtgtctttgacattatatattaataactagaaatcagcctggagacttgcccaagagttcagtgagggagcattatgttctgagctggggttgcagcagctgtgtaaagaggatgtctgagagaaccagccaccaaggagctaaaattgataagttttggcatttaagtaagagaatggctgctgaattagttgtaaggaagaaacaggagccccaattatgaaataggaggaattgaatagtaacagtggaaaattcaaatgtgtaaacaaaagtcataaatgttatatttcattgacaatttaaactaaaaagttcagtagttctacgattgaactttagtatttttcaggattgctgtgtggaaggtattatctattagttgattctttagttatataattttccattttttatattgtagctgaacacaaaattcataatttaaattttggcactatttacctcctctaaccaactactaagtaaagagtaggttctgaggtccttacatacttttgaacatgtaaattttctacttattttcacatttaataatatgaaatttttattcacctaaatttttatttcagattaagcttatttctatttagaagaaaaaaaatggtgtcaagtaccacaagagtaacagaactgcgctgttttctgggattttgtattttacttttttgttgttgttgtttgtttgtttgtttttgttttagttttttgtgtttttaaatggagtgtgctggatgtctctacaattttgttcaaatgactgcagaacctggaaaagcaattgctgctattgatgcataacatattgccattattgctctctctctctatctatatatatatatatgctaattgaaactcaaacgtgatgaatccaaggtgtttcagagagtgctcacttgtgcatgcaaatttgatttcatctttagtaagtagtaaagttatatgcttgccaaaaaataagtgacacactggaagacaaaagtcacacaatttcaattttatgtgtaacctagaaatgatgaacttatgggaacagagagcagaattgtggctattaggcttcaatgtgggtcttttaacaatgaatgattggtttaaggatataaaactgcagttggacaagaggcatggactctgtgaagtcttgaggtctactgagagcatgattggttgataacaatatgctatattttaaaagttgtgagatagtatactttaagtgttctcaaaacaaaaatgatgaatatgggtgctataacatgttaattggtttaatttagccatgccattgtgaacatactgtattgtgtatcataattgtgcatgactttatttatgatctaaataaatgaaaaaaaaagaaaaataacttcccaaaaagataaatttttggctaataaaaaatggaaataaaaaaaaagaaaaagtacttcattgttatgtgattttagaccctctctgatttaaacttgaatctctggggtttctgatcctggttaaatgtttagttctttctgttgtcaacctaagaaataagatgcatgggtagctgcattttctagtcctttaagtttatgaaagtagtcgagacagtttgttgaccccagggagaccttttagtctttggcttgttagacaacagggtctggactctcattggcattcagatcacagacagccattgggctgagtgcaaagccaagcacagctttagggtttagacaaagccaccctggcaaaggaacccagttgtcagggtagctggctggattgtaagaactgttgcataatggggagaccaagtagaactattaggatgcaaatgtgaaaaaaatggtggcactaacctgcaaaaacaaacatttctttttggtgaagagtctattcattgttgctttcttctgtttaacttctctgggccttagatgtagttggtgcaattggagtatattggtttatcttaatctctgttcgtaaagctagtctacatttagaatcaacatctaatttgtaggaagtgaccaaagtacttcagtgtttggattctttttgtagtgtgcaaatatgtcctggttcagttttatatgtgttgtttattatgggttaaaaagaggaatcttgttttgctattgatctttttatatttataacaaattattcttacaatttccaccttgtaatttctggtgctgacctcttagtatggtgtcttatatatagtgtagcatcatgatagatgttaagagtaatgctatccaaattcttaggacagtaagaaaattttatttgaataatacctgaaggaaatccaccatttcctacttgcttttgttcctttctgtcttgagtaccagctttagctttcctttttcttttgtacctctttattttttagcaaaatataatgccatatatgctttgataaatgctggggaatgagaaaagctagcagtactagtgggaaaggggcgtttaaccaggggcagagaatagcagtagtggccatgctttattgagtagttacttcgtgtcatgaattttctcatttaattcttaagcactgccttatgaggtataacatatccccccaccccattttgcaaatgagtatactgagtcaaaaagaacaaagtggcttgctcaagttcagttttgtttacagcaaaaccacatgccttgaggatcttggaaggttaatctgatctaaaagaagagttctttggtgaaatgtggatgggagcaggaccaaaggaaagtgtgacaaaacaagaatcacacacctgcctaaaagagaacatagatgtggctgggtggaggtagtctgaggagtacactgggatggtaattgctttgtgttcacatatttcatgtatgctgtttaattggacaaaagttcatttacttgttcatctaaggcgatttggaggttgattttaaagtatatgaatttttatgtacttgtttccctatcttgtttcagatagggaaaatctctgactttgttttagtacatttcaaggctcttattaaaagttgtatttctatatttcccatttttgttctgctttgctttcaaaatatatttaagcagaaacaatgatatcactgttgctttccaagccagtcaaatgctagatagcatttgatgctatttgttttgtttgttttctttgaccagagttttattgaaatctgattgatacaggtgacatgaaagaactaatgggaaaaatggggaggggcttgagtttgtgagaggaatgtccaaataggagagggagcaaaaagggatatataacactgaagatgtctgaaaaatccataaggaatcatgtgattttatatttactaagaattatgtatagtatatttaagcgtatatatatatgtgtgtgtgtgtgtgtgtgtgtgtgtgtgtgtgtgtgtgtgtgtgtgtgtagtttaaatgaagttgtaacacatgggatgataatatttcacacgagggccatagactatctaacaaagactaagtactaggcattggaaacctccttttgagttgttggtcaggagagtctgagagaatctgagagcaatataggctattgctgttgcccatgtttcctcccagaagttgaaggtaagtccctgttgctgaagacaacatatacattggacacaggactcaggaatggagctggatcttacctgagggtgctctacaatctgtcaaggaagaaaagcagtcattagttctactcagttgtgacacctttgaaccacagcaaggacaagcatggcaagataacccaaaatgtagaataatgacattcatgtcttcacagtaacttggtggtaactaattgaacccaaggccagttcaacaggagggaatcatgcctcatactggaaacgtagataagtactcatggctagtgagatcatagatttcacaggagagcctattactgccattttactggaacagtataattctttgctacattctaaatgtttatccttataggtaaatgtagcacatattatcaaagaagcttctcttcatagcagatgaagaccattacagaaaaccaaaactggtcaaaactgaccttagggtgcttagcccccattgatatatctacagcatatcccaaaactgagggtgtaacgaacaatgaataagaaagggtgggaagattgcaagagctaggggatcaggaaatctgcagtgagaatatgtcagggaagccctacccatgagacttcaacagtatggatgccaaaacaagacctgaataaggagggacatcaccagcagacatgctagcatggaagggtgaatgccatggtctcctctctagatgaagagctgcaggtatgagcaacagacttctgggagagggaaaattagttttcttcatgaatgaacctcctaattggttgtttaataccaagtggtcagccctgaaatcatatacatacaagtgacactaaatggactcagcaggttgtatttttgtgtgtgtgtgtgtgtgtgtgtgtgtgtgtgtgtgtatgtatgtatgtgtgcgggtgtgctcccacaatgtgggtggtggaaggagttagaggagagagatatggataatgatgtaattatattttaatttaaaatttgcaaatatataaaaagtttgatatttaaaatattttaagtgatagaataacaattaaaactaagttcactcagtttctttggtaaataatagtataaggttttggtttatttatgatctttgatttgtatttgcctttagtcacatatattcctaaagattttggtgatcatatactctgaggtgctgaataggtacaggagtacagtggcacacacagtatgttttctgtcctatccatgctatgtaatagctataactattgacatgccacgccttttaatcactatgtattatttcatttgatatctagtaacccatttactcaatctttagtctgtaaaattaaaaaatatttttaaattcaatcaactctacaataactttagtctcgtctgagacagtattatgaaaacagattttagaaaagctttatctttttgtctcatcgatgcatggtttaaaaacagaagccctatcttttctttcagtagttttgattggactgttttgcagaaggttctagttgaattagtttaaattgagtttgagggttttttgttttgttttgttttgttttgttttgttttgttttgttttgtcataccttaagaggaagccctaaactggtcatttgacttggagtgtatgacttggcataggcacagtactgaacaggtaaaagcaaacaaaagtgtaggaaagcagctaattatagtaattgcagctggtttcaaagtactcctaacagtttgtgtgtactgcttacttgaaagcatcaaatgggtgctagttgtgaaatagaacacctgtttgttgttgagcatgtgtttatgcagatgattgttgttgtcaaagcaccttgatgtagagtagtcctgtttacatttacattctccccaaaggattaacagtgttctctcaataaatttgcagtctattctcctctcaaaggctgctgtttggagggtggtgtgaaagaggcaacaagtgcttgctaatcacttgaatatacataattagccacagtctggtgcactggagtctttgtagggccataacaatgctgattggcaaatgcacagaacaatagatgtgtcaccatatagttgttgagagtacttactgtcttttcattggcatttattctttaactttctgaacttagctttcattacaagtccctttttattctttttaatgaaccagtgtcagatatctagaactctgtaaagtccccattaagaaataatgtctcagatttatttacaagggtctgagattgttattaaaaaacacatttgacataattagtaattacaaaaattgagagatgtcaagtttgttgggttgttcaatttacttcatagtggaatctctctcttgagtgtgtgtgtgtgtgtgagagagagagagagagagagagagagagagagagagagagagagagagagagagagagagagagagacagagagagagagagagagacagagagacacacacagagagagatagatagagagagagagagagagagagagagagagagagagagagagaggagagagagagagcataagagcaaaatacatcttattttcttatactctatctttgtggttagataattaaatggccttgctgtaggctatgtagaccccaaatctcaaattttgtgtctcatgatatgatgcaaagaataaaaatgggacttccagaaagctcttgtgctctggtatttgcttcctttccactcccaccacactcagtggtgactggtggtcactaacttacttgacattctagagatttaaatgtgatttctctgtcctctgaaaaccactctgccattttagattcctctattgagaattgtctatttagttctgtaccccactttttaattggattatttggtgttttggagactagcttcttgaattctttgtatattttagaaatcaaccccctgtcagatgtggggttggtgaatatcttttcccagtctctgggctgttcaacatccttagccatcagggaaatgcaaatcaaaacacttcggggataccatcttactcctgtcagaatggctaaaataaaataaaaaaaaaaaccaccaatgacattttatgctggagaggatgtggagaaaggggaacactcctccactgctggtgggagtgccatcttgtacagccactttggaaatcagtatggcgactcctcaggaaaatgggaatgagtctaccacaagatccagcaattacactcttaggcatttatccaaaagaagcacattcatacaacaaggacatctgctcaaccatgttcatagcagcactatttgtaatagccagaacctggaagcatcctagatgcccctcaactgaagaatggttagagaaaatgtggtacatttacacaatggagtactatccagcagaaaaaaacaatggaatcttgaaatttgcaggaaaatggatggaactagaagaaaccagcacaggactgatccagacaccaggaacgtgggtttcagtgaggagacctcggaaatccatggggccgcctgttgtagatcagtacttatccctagcataggtgtggactttgggagtccattccacatagagggatactccctgagccaaaacacatgaggttcaaaggtcagcagaggagggagaaagtttaatggcaagaggaattcctcatgtgtgctctgattggagcctgtgggcatgggatagatgggacatccttaatgttctctctggtgagatctgcattgaaatcatgagcaaaatctaagaaaattagcagcttttgcttggtccttgatcactctgagctctctgctctctaaagttttttgtttggcttctcaggctgcttccagacttgttgaaagtttaaaggtgtgggtgtctgaagcagtgaactgctaggtcaacagaacatactgtttagttaccttggggtctggcagttgcatccttgttctttcattttgtctggcagtcgatagcttttaatgtgctggacccttacataaaaaaaaacctgtgctatcaacaaataatacaaagacatttttatttcctagatacatctctaatgcccccattctcattgggaaaactgaaggtatacacaaagaaaattataacctgttttgtgttcagcgatgtcattaatacttttgttttcttaacttttttatgtgtgtacatagttcttcatatttcaaacccactgttttgtactgagaaccaaagtttggtttaaggtctttcattacacctgtgtatgttcatgtgtatgtacatctgcattttcttggtcatgctgcagctggacagcggtcaaagaattttgtgaactgttgattctttattaagtggttgatggatatttctagaagtccctgtaatgaacagtcaaataatttactggggtcatatgtcctagaacaatgaagttatattgattcagaccataagtttttcagggagttaatagttctagtcttcaccattcaagctgtgcattatttcccttagactattgttgttataggatgatacatatatacactacctgttagaatggaagttgagttccatgtcctagattaactttgtggctaacaaatcagtattgcaatgtgtcgtgtgtgtgtgtgtgtgtgtgtgtgtgtgtgtgtgtgtgatatgtgtgtgtgatgtgtgtgtgtgtgtgtgtgtgtgtgtgtgtgtgtgtgtgtgtgcacgcacatgcctatgcacatgatgtgaggaagccagaagaggacttggctatttactcttatcattttgtcctcctgagtctacaatgcatgtggcagggtctttcagtgaacctagagtgcatgatgtggccagagagcaatcccctgtttccacactgctgcccacagacttagggttaaggggaaatatggccaagctcagtttttttgtttgtttgtttttaaatatagatgagtggcatctgaacttaggttctcatacttgtgtaggtatcacattgacccactgaactactattctagccccatcattctcagtctgtttccttaagtgagatctatatagttttttagtatgatgtttgtacattgcttaggatatatatatatatatatatatatatatatatatatataattttctagaaatactgtgaaaactggatggtagtggtatatgcctttaattccagcactcaggaggtaaaggggggcagatctctctgagtttgaggccagcctggtctacggagtgagttccagggctgactctgaaagctacacagagaaaccccccttctccccctccacccctgtgtatgtacaaattaagttatgctcacataggcacctgtgaccagatgggcatggtcaaagccacaggtgcctctggtagatctctcagtacacccccccccccccgtcccccatactgtgaaatagaagggtagggtttcttattctatagactaaaaagaagctccattcttgactggagctttcaactttgaatgttttgacctataaattataactaaggtcagaatacttacaataagcccagtgttaaaatatgatgctgattgagtctatagttcaatgtcccctggctgccttttattttcctttctttctggttgagctgccttaatctgcttttgagcagtaatgtatattcagtatgtatatgtaggttaggactcttgtaaatgttaatacctctcatttgtactcatgtgaacaaatacttctcctcctccttcattcttctttttattattatgttgtcttaacctggtgtgtgcaagcaacctgttgaagactgagaaggctggtttttgcacagtactggaatccctgggttgtccagatagcaccactggccaggttgtctgtccagtgcttgagctgaatggactgataaatcatttgctttgctttgctctggtattgctagggtgtgttgaagaacaccttattctttgggtaaagcaagttgtagcaataagtctttccgccaaagccacctgagccctgccgccacgtgggcgctttccgccaggctgcccgagttccgcccgccgacacgttaaggtcccaggtaacacacagagacttatattaggtacaaatgctgtttggccaatgactaggacttcacatctgctagctcagtcttaattatcataaatctatatattttataagacttatagaggatgccttccgatggcaccctctcttgccatgacggatcacatggcgactccagagcagagaccaggaggaagagaaaagggaaaaagggacaacttccttcttacccttgtttatatgagtctccctgctatgtcacttcctgcctggatcaccacttctttattacatttcccagaatcctccttgactcctagtctcacctatctttctgcctcattggccaaacagtgctttatttattaaccaataagataaacatacacagaagagcattctccatcagcaagttcttttttttttttttttttattctatccccatctctaccaagtctttacctctgtttcacagggattttatgccttctaagagctgcaagaaagatgatggagtactgataggactcttaatttgtgcttttttacctccccacctcccagtttgtttttcattttatttatgttggtaaatcctttgtggctataggactgtcgatagatagataaagaactttctattgggttaagaaagagaatgatggttggtaaactgagaaaactaccatttgtttttcagtaaaattaaagcttattttgagaaattctacttttaagttatagaaattgaactacatggaattaactgactatatttaatatgtgacatatttttaggttatgtgtattgggtttacatttgcaaaacatttttaggtctagtgtggatatatcaaatgattttaaaatacacagattttacaattattatatctaagttaagcattatctaatatgaacataatcagtactgatactgttctgcataagcactaattttttaaaaaggacagtaggttttctggtttcctaagtttctgataagtatacacatatcatcacctttctttgtgtattgatcctatgaaaattatatttgcaagtacttagtagttgtaaaattatttaaataacataacttttcacaataaattagctattgcttcttcacattctctgaatcagttgtaatgaatctttttctatatcaccatccaactcccaaataatgacacagagacttcttactgattatgaaagcttggcctatagcttaggcttgttcctgactatctcttataacttaaattaaccaacccatttatattaatctacattctctcatgtggtttttacctctcttgtgtctagtactttctgtttcatttccatgtctcctggcatctcccacttaggcatgcctgatttcctcctttttccctttctccccagaactcccacctatctctcctacctagctattgtccattaagctctttgttaaaccaatcagcaggtgccttggcaacacacatattcacagtgtgcaaatattctgcaacaagttgtgaagttttttaaagctgttttatatgtggcatatggatccttttttattaatactgctaaatcatgtaagtcaccgttatttagcaagggggctttgaaagaattaaatacatttgagctacatattcagaaacccacaatggtcttgagaaggaaggcacagatacatggtctcttcagtgtctcacttagttgttgtggaagtctcagcctcggtgctcctatctccaccttatcccttagaaattgtcttgtgctgtgagcaatgtcctactgtagggtgttattctaatcgctgaagtatagctaaaaccagcttaggttagctgaactgttattctagtaggtacattacctttcctcaaaggatggcatgacactccttccactcaccctcactatcacagagtcagatgttgaaatgctcctttcccatccccagagagtagttcactagtcttgacttactcctcaggaaaataaaagctccctttggaacattgccagcactttctcagaacttttcttcgcattttttgtagttttgctgcttgtgtacttgactctctttcatgttgtaaattgtctcagaatagtagttttttttttttttcatccctctccaaacagtatccaagtaatttgttgaccagagctttgctgaaattttatcttggaatcctttaaaatatgttattaaaatttcaaatttccagaagtagagttataatttctagactcgggatcctggaaggtgggcatacttgcgttaagtaaccttcgtcagttatctgtacagaaatttaggactctaccttaagttttcatagaagtgaataagattgtattttagtttagtcgaacttactttataattgtcaaaaatacaacatttaaaaaataaaacataggaagtatccttattgtatttgattctttgaaaattgccttattgattttcattttctgtttggttactgattggtttacataataattttctgtgcaataggtccacaaaattgagaaatcaatcagcaggactcattactttgaaaagtaggaaaaagtagtaatctttacattcagtaaaagggtagttttattgttctgtcaatttccactcactcttcaatttttcttgagtttggtcatcccttgtattgttgcaggttcttgttttgcctgttttcctccccagtcttactgaggtgctgagttcaaacctagagccttgcacatgcttggtaaacactcttccactttcctacacccttacttgtgttagttactgagtgtgaatcttgtttggagggcctccaggctcaatttttctttgccctcttcactgatcattgtcgtactggcgcaggaaaatatttctatatatggtaatttgtggattattaatatattttaaaacttatgccttttatatttgacttaaaaatattgtactatttctgtaagtgttgatgactagtctgtactttttagaacttttgatttttttaaagacagggtttctctgtgtaacacccttgctgtcctggagcttgctttgtagtctaggctggcctcgaactcagagatccacctacctttgcctcccaagtgcttggattaaaggcctttaccacctcatccagcttagtctgtactttttaaatataagggatcaaatccttgagttagtagcattacaaggtgagaacatttaatgcaatgtaatgaatgtagaaaaggtctatagaaacttttaacttggattcctagatctggagatggagggccacttcattctcaacagatgccttcaaagtaataatttttatatttattaaaacaaaaataagaggtttaaatcaacttacattcctctctccctccctctgtccctccctcccctcctcccatccgtcctctctctctctctctctctctctctctctctctctctctctctctctctctctctccttctttgtcacaaagatgtgacaggcatctatgaatagtgatgaattcaggaaaactcctaagctagacattaacttgacagttggtggacagatgctcctgatttgagtgtgagactgaggtattcaaaaagcacttcaaaacactcttctatgccagccaacattattttcctcatataaggatagtggtttttttagctacttggtaataatgtttattgataaaggacctcgtgatacctggataaaatatttatggttcactttttaatacagcagcatgtcacttttataaagttccttttagatcttaatacttagaaactgatttttttttaagaaaaggaacatgtatttttcacattttaccatgcatactttaaatgaatatgacaaatgttgacttcaaaaagaagttttgattttgaaaatagttactcaggactggagatgtaggtcacttggcagagcatttgactggcatatatgaagccctgatttcaatacctagtaccacataaaacatcagtgatggcatatgtctgagatccctacacatgggagacagaagtaggaagatctcaaattcaaggtcatttttgactacatagcacatacaaggctgtgttgtgctacatgagaccccatctcaaagattttttttcccaagtttatttctaatgttacttgagacaaaaaaaaaaaaaatggaatcttgaaatttgtaggcaaatggatggaactagaagaaaccattctgaacaaggtaatcctgtcaaaaaaagacacacatgatatgtactcactcatatatggattttacacatagagcaaaggattaccagcctacaatccataccaccagagaagctaggcaacagggagaactcttaagagaacatacatggtcccccggagaaggggaaaggggcaagatctcctgagcaaattgggagcatgggggagggggagggagctaggaaaatgagaaggagagaagaggaggggtgaggaggtcataaaggagcagcaaggttgtgtagggggaggaatagaggagagcaagataagagataccatcagagagggagccagtatataggtttacagagaaaccagacactggggaaatgtgcagaaacattacatctttaactgaggttataaacaattgctttaatattgctcacatctaatatgcaatatttgaggtgtggcttgtcatatttcactttctcaaaggtttatgtgaagaaacaaatctttatatatttttacatttagggagatactttctagtggttttgggtagatattccagagctctccatttttttttttttttttttttgtgtgtgtgtgtgtgtgtttaatctgcttgtagtacaaaggccttctttgacttaattacatttacttatttatttgcatgtgttgggggcacatgcatacctaagcacatgcctgccatgacatatgtgtagaggtcagaggaaaggttgtggcatttaattctttccttctaccatgtggtttctggggatcataatcaagttgtcaagcttagtgatgagagctcttcccttctgagccacccgtggcccttctgtgactttaggttttggtctgggaacatgatagttcctgaaactgttttaacaatatgggatttgagaggataccttttgtaaaacaaattttggtaattatgttgtaacatgaatatagacagaagatatgacaaaatatagtaaatgttcttaatgtttgatgtttggctcatgagagtgacataataccagagaccttctaaactatgcaaattttagtgactacaaaattaaatgtatttattttcaaaatacatttagaaattacttagaatgttttatgtttggcttgttagagattttgttatgtagtatttaatttgaaaatgtcaattcataaagtgtctgtaaacttacttctcatttaccttgcccaacagcagcagaaagtttatgtaatgttacagtaatatttgtctgtattagataactgatattccatgatttcttcgaatatagaaggttatcatatagagaataatatgggaataatacgttttacagggttagtctatttctatggtgtaaagaataatgaaaagttagaattctaagagtattgcttatgagagtattgttggtaatctcactttccattttaatgtgctatagaaaatacttaatgattttatatgcttacttttttgggatatatactgggaggtttttagaaatggctgaaatacctgggacaatgtaaaagtaaaagtgggaaggcaagggctgttagtaattttattgaccccaaattattttaccccttaatgtttatctgtgctataagttttaaagatattcatatttggagatggtacctctttagttgtttttattctttaattaaggcaatattttaattattgccaattctgtattttttaaatgtatcgttagatacaaacaaggtcaagtcagataaaatattgttaaattttatataatgtgataaaacatgattgtatttaattttatgtattttgacattgatgatttaatgcttgcattgggatatcttttaaatagttaatttatgcacggatattatctcactagaaatatttaggagaagagactattctctccctatatccctgcctcttccctaaatatacataccacagaatttctcattttaatactttttagacgtatagatgctttcgtttctaacttgtatgtcataaggcgaagggaattaaggatggatctagagacttagagtagatgttaatgtagccagggttggctgctcattcactaagttcatttgtatctaccacttttactcaaaagcctttcattttcacagtcgagactcccttctggtcacttagaagtgaggtacaattatgagtctaggttgtagctactgaaatttgagcagagataatggatattttctctaatcttggctcagaggcaactcctgtgtttaatcttatttgtattttcccttcgggtttcgatcaagaaaacaagcttctaggaagaccaattctatggactttgagtcattatgtggggtagcatggtggctcactgaacaggatgatctgttttgagttcacctgagccaaaaacttgtgcaaagccactaagatcttttggctagtcaaaactttgtgtcactgtgacaaatacttgaaagaaaacttaaaagggtaaaacatttaattttgtctcacttttttagatgctccgttagtccatggctaaatgaattcattgctcttggcctccagtgaagcagtatattatggtgaagtacagcctgctacctcttgttgcatggccaggaagcagagaaaaaaatgggtcggtacaagatagaccttttcagtagcccccacatcttgcttttcaccatctctcagtaatgcaatcataatatgaatttatcaaagaattactcagttgcttagtctgagcccttactttctaaaacctgtcacctagcagccaagtccactgtacttgagcttatttaacacatttaattttcaaaccataacacttgagatttatcttcttgagcatctagcattaccttaactaattcattcaacagtacttagaatgaatatattactcaaaagtagttcttatttgtttagaatataattcagagtcaaaaaacaaatctgaattgagaagtaagaaattgggtgtggttccatttaaaggagtagtcaatgtgaaatttagtgacagaaaatgaatgatagtgagaaaatgtcataagttgtgctgtcgaattgatttaaaaaaaacttagagatattgagtactgtaaaccagtataggagaacaattcttgggaattggaaaaatgggatattatgaataagaaaatctagtctctaagaattagattttaaacacaattggtttgataaataggaaacttgccatattctatataaagtttgcaagtataagttttgcttactgtgatgattatcaaagcgcttgtgatattcagaaaacatggaatggctgatggctaaagagttgtaatcctagccaggcgttggtggcccacgcctttagtcccagtattcgggaggcagaagcaggctgatctctgtgagttcgagaccagcctagcctataagagctagttccagtacagcctccaaagccacaaagaaaccctgtctcaaaaagccaaaaaaaaaaaaaaaaaaaaaaagttgcaatcctatactgtaggctgaaatttggactcgttacttgaatgatttctctaatgaacctttctctaaggtacatgaatgaattctaatatcactccctgctttgtgtgtacataaagttgaatggcttacattcttataatacctaaacacgggtgatatctgccttgtattttaaatatgagtcattggaaagaatattttaaaagaaaaatgcatcagctcattttactaatatttactcttcatattgatattaatagaatttaagccattgaaccttaaaattggattttatcagacattaaaagtagaaaagtaaaatgttgtatcttaggttgcttaaaaaatagatagtagctataaattttgggttgaatgtaagctctgaagtttcagtgaaatactggtgggcttataggaacagttatgcaaactaaaatttaaatccttgtaagatgtatggtaaatcaaagtaactgtgaacatttgggattgttactttttgtcaggtgtagttgctcctcctctcacggtattctagtaggctttagtctttgaaaattaaaagtcatgcatactttaaaaatcaataggtaagactcctcttacagatatgtagtgatgttaactaaaagatggtgagataaattacaattatatggaaatcacttgtattctgctataataggaatgttttccctgaacattttatgtaaagcattcaccagtacaaaaaaacatgttgtattttagaactaatagtgagtgatatactcagatttgtcctgcttggatgctgtaatagttctgaatagtagttatatgaaatataaatgagttagaatttatcactaatgtaaatagtgatttatgttacaaagccttgagttattagcatattttccaacagctaagattaacccaataaactacaaatctgtttgtccccctcctacttgttttactttttctcttatcccaaccatcccactcgttttctcacctgtgttcatttgaattcccagtgcttgttgcttcatccatacttagccctttctaagggaggttggcttccagtctctccttattgtttaaggaagatttgtctctttgaggcaaactggtggacatttgacccaggaactattagaaggatgttgaaaactgaagcaactaagagatgatgtcagtctgtgacattttgggtaggattgccagaagtgttaggaaagcacttaggatggaactgaaaactctgagcaagctgagaagttggtggtagagagcttgtgactaatacttcagacatacacagagagatgcaactaggctggggcaggaatggaagatgaataagcaaagtgatggacaccagccctcacagaatctctgaacagaacaaagggatcttttttcaaatcactttccagatctcacttgcaggaagttgggtcaatatattgccacatcagtgcagccccctttcttgagtagtgtgtactcttataataaatatctcatcattgtcatcatcatcattatctattattgttaacatcttcatcttcgtgggtgaactttgttcctagtaatcaaaagagtgctaagaaagcaataaggttaaagacaaatgtcagggtacatttatgataagaggcttgcttgagacactgttctacacaggacctttccacttcttattgttatgtcatccttagaatgagttcctttatggcttctgggtctttcagtttgagagcttgtgataggaatcttgatttgcctttattatagaagtcaaacatttatagtaagctggtacattgatcaaaattctgatatggaagtctgtaagagtgtgttagccttcctgcatttcatagacttatataggcatttatcaatattgttaacaaactaatagaccactatattcttatataaatgctttgttagaatgctggccaaatatttaagagtaccccacatattataaattatgtttggcatttgcacaactcaagtggacttcaattatcccaatttaataaaatcactctggtacttttgtgctatgtatgagctcttaaatatgcattaaggtaaatagaaattaagatgtttaataaacctaaatactgggctctatacttacatgttaggaaagtttcttgtacctttgtcctgtataaagttcaccccttaggtcatagatgtcagaagttacttatgtgaaggacacactctccttaaaatgttatctggactcttggcaagtacttagaaaaagcttttaaagtgcacaatgaaatttgggtggttttgtcattttcattataccaagcactttcaggtagtttaaaaatgcatagatttgcccaaaaatctttttgataagatgctgaaacaacacttacagaaaccatacgcatcagtattccattaaaatttcagagcttgctttcattttaggttttatatctaagtggagcttccatcttcaaacacacccctaacttgatattcctaaatcaaaccaaattctttgcttttccacaagaatagctttctatcattatgtgggggaagagatcagtctcatctttaaatgttttctaaaacaaagttaccctttttttgtcattcacttatactagaatagttattatataatgtttctctgcctattttagaaaggaaaattttttatcccctttgtagatttctacattttttaaacagcaatagaatcacaaatgatgctgatcaagtatttcccagacaaaaacacaaaccagtacagatcacataataaacattaagacttgtttatattttacaatgtttagtaaacctttaggcagtatacagaagtgaattataatggcccaaagatagtatcattaaaggaagctaccacaccgtgataggggataaagttttatcttttttaagccaaggtggaaatgtattatggaaattggttgttgtcatttgttaggtggagttcctttttccttctgagtgtaattatgtctaatttccaaagtgggctaagacatctggagtactgggagtccggggatagtatgaccattgatagatacatttcaaagttaagcttaagtagggactttgggtttggggatgggatgacatttctataagatattttactgtaaatgtcccccacattgatcagaaggacacttgtggcaaattgtagtagttcagatttatgctttttctccactagaaacttttaggattcctatgagttctagttggattccacagtggttagaacatagttgatagttaaacacatgacactattatctcaagaaaaacattgatcacattaaatttacctgtgtttaaactagtaaactaatggaacatacttttctagtttttttttttttttcagaaaaaaagatgatagataacgggaccttgatacatagagtattgatgctgttaaagtcttttttttttttttagcagtaagaagattttactgaattttgaagtagacagaaatatgtcagtttatgatcgtgtgtgtgtgtgtgtgtgtgtgtgtgtgtgtgtgtgtgtgtgtgtgtgtgtgtgcgtgtgttcgtgtgtataaaagcttttctatacatagtctagaacagtgcttggcactgttacatagtattctgttactaatttttaacaaaacagagcatccctagaccatgtacaatgaagtgtttcttctaggtgtactgtatatatgagttagttagagttctatgtgtatcagtgaaatggaacaaatgagcttagtaaaagataattttcatgcataactcatctttaaggttggctgtagaaatctatctactgtcatagtttattctgttggaattttcaggagtattaacagcttagaaaacctttaatgaacctatattcgttaatatcgtttgagttaagaaagacattttacaaagtggacacattgtttaattttgttttgcattttactagattgcagtgctaggccaataaattaaacctaggcagttctgttgctaattacacacaacttctcttggtatcagatattcaaatccattttatgaatatggtagagagaataacaactgtaaaacaaagcagtgtgcatgtaagtgactgttagcgtgcatttcagaaaggataaatgctcaccatatggtacaattactgtgtccaagttttcaaattagcttctctcatcctccttattactgtctttaaaaagagaggaaaaagcccaacatgatttatctactctgcggcagaactcttgacgcaaaacagcagcccagttctgtccagttttttttttttccttagcataatggtggctgtcggacttttttatactaattactgtgtgagcctcagatgaaccccttcaattcacagggctttgttaagggaggagctgtcaatgtgtctgcccgtttgcagctgtgctgtggctttagcttgcttaacattatgctgctttttagacttgacagaagggatttttttttttttttttattaaggcaaagcagccttgtagcgaaatggtttaagcagctgcattgtagggaagcacaaagaagttattattgtgtctgtttaggaggggggaggataaagggggagatattcggctgctgttgatgccgattgttgacttgccatctgccagatagggagaagaaaaaaatgacagctccagcagggtgttcaagaggttgtttggagagacgcataaacatgtgcagatgtcgagctgaataatggctggaactggagacggtttatgatgctgctgctgtttgtgcacatacagaatgaatgtatgtgtgggtttggttaaccagggtacatactaattatcattgttttcctgcatgccccctcctcggattttgttaattagtttaggggtgtaatacttcctcttgtcccttgttcatgtctaggtttagaaaacaactccctgaaatggcaatacaaactttcttaacttctctatgaagaaagtagataacccattaggttaatatcagatttgaattcataactggtaataggtaataggaagttttgattaagtaatcttttagtttagttactatcttctttatgattccactgacagtttaactagtcagtacttaaaactgtcatttgaaactgaattgatttgttttatagtttatcactagggaatcttaatgccatatttttaaaacagttctataaaactttgaacctagatgtttccaattgtgaaagaaaagaaagaaaaagtaggttacacataaagctggcttttttgtataataccctttctcttgtttttgtttctattaatagcaggaattttcatcaaactttgatgagttgattgttttctttcttgtcctttcatacaattaggtcttagagttttgaatatctagaagtctctttgcatatcgatagaaatagctatttatccaaatatttttctttgatctcaaatagttgagatgacacagtcatgttatattgagattttttagtatttttagaacacctcagtttttggtaaaattttaaagttcaatcacaatgtaaatgaatgattagaaaagagagcctgtttcttttttcttttttctttttttacattccccttttaaatgctgtttggatttttaatttaaaaaagaaaatgttaggagaattgctaagaaatattgtttatttcgagttttgatacactcatgctgttctaaacacataaggtcttgttatataattgttaagtaaaattgcccaaagtggttgaaaggccagtatcctgacagctttgggtccaaaatatctttctgaaagagttatttgctgctcataaagaagttgagtcaggtctttctggaaaaaaaaaatctgttttgttgtcacttacttctctagcaactctaatgtgtacttgctgagaaagcacagataatcatcagtctcactgggcctctcctttgtctcctgtatttctttcatttgtgaagtgtagaattatgcacggattatttgtagtttcacagtcagtactgatattcctcctaagtttgggacaagcaactgacattttccacatagaggttttgttaaattgagagtgtgatttgccagaggtcagtatgctaatgagcagctgactaaagcgagcttgaagacagcaaacttgcctgtctatactgtattagtcatttattttctcatttcttcagagccatttaacaaacctatgcaagaacacacagagaagtgattgaaatattaaaacagagtgtttttgcaattaaagggatgagatttaaatatcacttatcttagataagtgagcttataaaagtcacttaagctgtttgagcctgaatttattttctgaaagaaggaaacaataagagccattgaaggaacctggaaagactaaatgagatagatagtatgattagcatgtctggaacaaagtcattactagctgttagtagtacttcatgtttgttagatgtaggtgaaagtctagacaatgtagatgctgctgttagcatttataagatgttctattgggaagtgaatacactagtttctagaggctgtgttaagggaatggtcacagatagaagattttaatttcaaaatcaagtgtttagtgacttgctgttgttccattaatatgaagggaaatcatttgcttaaagagaatgtggagaaaattgttgaatgtaaatattttggaagtgtaagtggcttttcactgatagattcatagtgtatactgtaaagttattttcctattcaaaaataagtatgcaagtacgaaagaattcacctctttaatggtgatctcacattatttttggtaatctcacattttttttctgctctgacaaatactaatagtgaacaaatagcactaaaagtatggcttcctttcctgcagaagtttaaaacgttatttgattgtcagcactctttactttgcagatgaaaaaagctgtcaggctcccgttggggtaaagtgccagggtgaatagaagtgtttccttggaggaattaagaggaaatgcctttattgagctgggtgagtcagtgaattccccagagtactaataattcccacacagatgtacctggtagtttttaaggtttttcttttcaaatgttgtttctgttaattaagcatctactctattaataagtatgacatactaaatttgaatgatggctgaagcaaggtgttttgcgccataggattagaggaaatgacaatggagaatttcaaacaaggaaaagtggtgcatggctttaatcctggtactcaagagtgggaggcagaggcagagacagatggatcctatgattttgaggctatcgtgatctacatatcaagttccagaacagccaaaactacaaagagagaccctgtctccaaaatcaataataatagtaatgatgatgatgaagatggtgctttactgacatactggttttaaaaagctgtttatcagaagtaatttacataaaaaaagaaatgggactatccatgtctgtgaactgtggtataacagctgaagaagccacctaaaaatagctataaaggcatttttataaatgaataaaactgtactgcatgtattttcaggacaactaaaaaaagatttaggatcttctagcttttatggtatatggatgtatttgaattatgcctcaagaaaatactacatgaatagtaattttaaaaaatattggccagtatgttgaaaacaagaatatttcactgtctgacatactttttaaggcatcttgcaaaatgttttggcttaaagtttttaatgtgtttttagtcttaagaaaatctgattgaagatgttagtaaacttggtagcacactttttagaatagaagatgattagacaaaaaagtggaaaggcataaacttaagtagttgaagggcattaccttccttccttccttccttcttcccttctttcttttttttggggggggggactaagcaagtcacttatttgtttgagagtggaacacaacatctgagtttataattttgtacttttatgtgaaaatgcgtggaacagcagctgttgcttcctggcatctttctgaagagatatttgtgtgtgtgtgtgtgtgtgtgtgtgtgtgtgtgtgtgtgtgtgtgtgtgtgtagaacattataaaatgactttagtttccttctcttgtttgtgatatgtttaagacacaatgtagttaactcactctacattctggtttagttaaaaaggatttggaatttaattttaattattttattgttacccaaaacattaatagaattgtgtagtttcaaaggataaaattgtttaattttactaatataaacgttaaaggccaagtttattcaaagttagaaaataacatagttgttaagtgggaattgtaatttaagttatgggaagaatggggcttttcctaaaggtatatataaagtctacatgaaaactcaattcaggcatatgacaactgattggctgtataaaagtaaattttctgttatcttgtaataattttctctcccttcaatgtgccactttttaaaagctagggtttttctttcctctttacattgtgtggtgtgtgtgtgtgtgtgtgtgtgtgagagagagagagagagagagagagagagagagagagagagagagagagagagagagagacagagacagagacagagacagagacagaaagacagagagagaatatatttcatatcattggtgtgaagtttaggtgtggataatcgtcaattaacataaataaaactgtgatggtaagattagcgtttttattgtgctaaataaaagatatcacaccactgtattttataggggcatattttgttttataaaaatggtcagtaagttaattgtagaaaatgttttccaataaaatgtactttatgaggaaaagaaaataaataaaataaccattatgatgtccaaatacaaatgatgataaagattgaaatattaatatataaggagcaaagttatgcttatttccagtttttaaatctggtttttattagaatgacttataaaggttgtttcctgaaatttctggctatgtgttaagtaatactgccctcagagggccaaggtaagtaaattcatttttaacattgagaagtggcttccctggtatttatctgataagtttatttgagtaattgaatagtgtttggtttctctgtctttttaaacatgctaagtgtatctgggctcttcaatttgatgacttttactcacaattctttcttacaaaaataattaacagctgactgaccacaaattgctacattagctccatattcaaagaggataagaaaatcacctacctgagaaagtgattttacttgtgtatgtcttactttttcatgcatttacctctagatattaaagtattataaattatttgtatttaaaataatgtgcattcctacatttgaatcaaaatggaagcatatttcctttcaatttaaaaatatatacatattaaaaattttaatcaagaatatgtattttactagtatgtaatggttatatataaaatatcatacttaaaaatgtactttttccaaattaattttaaaagccaagactaatatgtagtttagtatgtttttaaattcagggtgagattaaattgttcaataaaagaggaagcacaggaaaggaataatgttaaaagaacgagatacagcctttgcttttgttctttttgcatatagcatttttaatgaaattagaaagaaatgaaatacttattactgcatttccaggattacttgatactgcattattaagaaagaggatttctatgacagtattggcaatttttagaagttgagattattaatgagaatagtgaataaaaacaagaccaaatacagtaaataatgaaatttaagtttatcatttatggtgttgcgtgagtgtgttgagggcagaggtcaatgtcaggtgtctttgtcactctccattatcccccctccttttttgttgaggtaccagtcacttgttggaagctcacataatcagctagactggctgatctgtgagctccagggatcacttgtctctgcttcccaagtgctgggaatgcaaacttgccatcatgcccaggtttttctctttctttggttttttatttgtttgtttgtttttcaagacagggtttctctgtggctttggaggctgtcctggaactagctcttgtacaccaggctggccttgaactcacagagatctgcctgtctctgcctcctgagtgctgggattaaaggtgtgtgccaccaacgcctggccatgccaagttttcttatgcaggttctggagattgaactcaagtccctgtgcttctgtgctaaacattagcaactgtcttccagcccctgattttcttttacctgccttaaatatgagtttaatgcatgactacaatgtatcttcagatctttgcctccccccagtctttttcattggttttcttttttataccagtggatattttagtttattagcaaacgattatataattcttactgtgagtagatgttttgtttatgttataaatattaatctatttttattactgttgtttccattttccagaaaaggaaactgaggtatagagagattgatgtactaagtgacagaactgtcatttgaatctggacagttgggtttgcaatcactgtgtgaaaggatgttgtgtctgtttaagtatcatctttgtcctctactggcctttccttatgtctgtttccttctgactatctctgcagagatgatgttaacaatgcttgcctctaatttgtgtgaagagattccttggggtgaaacatgaacccagggcttagctgaggactttcaagttttctttgcttctgtcttaccctttcttccctttaccctgtaatatgatgctggtgaatgtcttggattattgtttaagaaaaaaagaaggaagaggagagttttgaagggcaggaatttactcttaaaatgataatggccatgagtttgaggtcatttttagggtcccataccactagaagttgatcattggagattcataggcaaaggtctaagataaagcagcattctttccactaatttttataaagtgggtgtgaaatgggtaacaggttgaagtacctgatggtctccccacccccacccccactcccacacataacacaggcctcctggttatggagctccacagtttcatagcacttgcacagtaggcaccaaaggggaggcagagaatgatcccaggttggtagtatactgagatatcctgggtttttctaccatgagtgtagcccttcagaatagtggtgaattgtttatttattcaattagttatttctttgcttgatctgttctaggcattgaacagacatggcgagtaggtttgagttacggttacattgtttccatattaagactacttattataattatatatatatatatatatatatatcttatacttaaatatttaagagaggatgttgtgataaaatggaaaatatttacagtataggtgttaatttttataatgaaattctatgtttaaattagttcattcctttgcagatttgtttttcttagtgctttgttttgtttagaggcttggtctttctatactacactggctgtcctgaaactcactatttaaatcaggctggccttaaactcacaaagatttgcctctctttacctttgcattacttttgccatttccacattattaaaaaagtgtagaaattacttaatgcttaaatgtggtgttgtgtagaaatggagagtttttgcagtgatgtagaaaaagaaagctttgctttcataatgtacaagggcgtaagtgaaagcaaaataataatttagctcacatttaacccagcaggaagctgagtacagattgagtaattctccacaacatatctccttctatgtaaactaatctcatggtttattcttcattaaattgccaggatgctattttctgctggcgagaatatgtgcaccagtgtgtgttctccactcccccttgattttctcagttaaatttgatactataatatggttaggatgttgttttgtttaaaagaataatttaaaagtattatttcttggtgtaaagtgtaatgttgccttaaaacagtaagaaccaggctttgattagccaggttattgagtgtcattaaacagaaatccagaatgcttaaaggtaaggtggtacttgttcagcttctggaaaattttaaataaatactgacaaatggaccacccggaggtcttagggaagttgagattggccttctaacatcttagagcagtggctctcaccctccctagtgctgtgaccctctaacacagctctttatgttgtggtggccctcagccataaaattatttcattgctacttcataattaattttgctactgttatgaatcattgtgtaaatatctgtgttttctactgatcttaggcaaccctgtgaaagggtcatttgactcccaaaggggtcgctacccacaggttgaaaactgctgccttacattgttcagttcctagatttttttaagtggttcaacttcaacacagaacatggacccttgccttccttaggaagtagacatgaaaactatatttactataaaaacggcaagctcatgcattatgcagtggaagcagaatttcttcttgactataatatatttctcaaaataatcatgagggaacatacggaaaagcagagatatgtgggtacatctggaaagtgttcaaggcatctgggaagtcaatgcagaatcaccaattgtaaacagcttccatgttgccagttgcaggggtgatggtgtctagtccaggagcagacacaggcagtgtctcctcatctttgagtcagcagaacagcaatagaatgctgaaatgttgaaagacgtacactgaaatcgcccctagacaacaggtagtaccaagtactgttttctctaggcacatgtgtagatacttggaaatggaaaagaatgagagatgatgctgttacacattgcttagatctcatagttcaacactagttagttaaaggagaaggaaagaacttgtttgaaagaatcaatgaaggaaaatgatatgactgttgttcaccaggaatgagtaaatacatttttatttatttttttattttgagtgtgtctgtgtcctcaactattttgttcaaggctacctcaaacttctgagttcaagggattctttttcctcagactcctgaatatctgagactgcagatgtttgcaagagcccagctctatttctaattacaatctctcatgccttcactttctgtattccattcttaacaacttcttactagacttaaaattttatgttggttggactatatctgcatcatttatttctacatcctcagtacttgtatgcatttcaacactaaatatttttaagttttgagactttatttttgttttctgtgtatgggtgttttctctgcatgtctgtctatgcaccacaaatgcagaggctagaagagggaggccttaagtcctctggaattggacttacagtcaattgttgtgagccaccaggcagtgctgggaactgaacctgagtcctctggaggatcagtcagagctcttcagcattgaaccatcttgttaacctcacaacaccaaatatttttaacgattcaacctaattttacacccttctcctatcaacgtgttttcaaggcatagtctttgatcatttgtgctccttgaccacttagaatgagtgacctggagcctatattgcctttggtgtgttttgttgacaaacccagtcttttttcttttcttcttcttcttcttcttcttcttcttcttcttcttcttcttcttcttcttcttcttcttctttttgcttattcaaactaacacatatttgaagacagttgatgacaattattcaagtaacattgataaagattacaaaagaatttatcacttttaatgtactgaagggcaaagaaataacatgtttggcgacagtgaaaaggaagcaacaatttaaacagtataatttttaaaaattggaaaacctaaattttatatgtgtatgagtatttgtacacatacacatcactatgcagatattaaattgttaatgttttaagttatatgttgaaataatagctaaaacctctttagttacttttggattacctatatctcatgttaaataaattgaataaacatgagaataacctgctgagtatcattcttcctgggattatttagtgtcctctgaattataaaccatttccttagatttaaataatatattttaatatggacaagatttcactttcaaaagttacgtttttatatagtcctttgcagttacaaagtattatacttcactgcattgtaaaaaatacaaaataaaattatcaggattatttttaagaaatatacaaaatacactaatgataaattcaatgggaaacctgtttcttctccctgagacatgaacaggcttccattggtggctttttttgactcttttgtataaaaatgcaacaggcagttttaaagattgcagatgttgtgctatatttaacacagtgtgctttcctatataatatctggctttaagatagttaatctatatcatgtaatgctgcattgtacaatttttttgtttatggggataacatttatgaaatacactgtagaaaaatctgctttattctttcagaagctcatgtgtttaaatttagcttgtatctgtcaacaaataactaaatatttactatgatgtgaaccatgaagttaaacagatatttatgctaatggtaacaataaacctctttttgtatgaggttaaaaaatgaagcccaaagctgggtgttggtggcgcatgcctttaatcccagcacttaggaggcagaggcaggcgaatctctgtaagttcaaggccagcctggtctccagagtgagtaccgggatagggtccaaagctacacagagaaaccctgtctcgaaaaacaaaacaaaagaaagaaagaaaggaaggaaggaaggaaggaaggaaggaaggaaggaaggaaggaagaaaaatgaagcccatgaagacttctattctagagtacagctagagatagtttattgaaggaattaatttttgtctttactgaaaggtgccagacttttttaaacatgtaaacacatttattagattgtgtgtgcgtgtgtgcgtgtgtgcgcacgtgtatacccgagtgtgtgtgtgtgtgcgcgcgcgcgcatcaatgcacaagtatgagaatagacacccatgtatgaaggtgaacaaacattttgtgtgcatgtgagtgtggaggctaatggctgaagtcagctgcctcctgctgtcactttctgccttgtatactgaggtgggtttctcagttgaacccagccagagtctgcaggttctgcttgtctagctatattgttccagggatctcctgtctctgcctcatacagagtgggatcacagcctggcatttctgtaggttctgtggatcataactcttgttggtcaggcttgcacagcaggtgcttttgcctgctgaaccatcacctaagctctgagaaattcttaaagtacacttacgtttatcataaaaagtgttcataaagaccacgtggcttgggattaagtacttgggaggctaaagctagaggattgcttgagctcagttcaagattggcctgggcagtataggaaaatcccatcaataaaggaaagaagttgtgaaagctccgagacttctgtttacctttctgatatctttgtcttaaagaagtagtatgatctgaactaatgctgtaggtagatattacatattgcatagttttctttttgttattaataacaccatttcagggctagagataactattgtatgttgaaaagcatgcaatggtcttgagagaattagaatttggttcccagtacccctgtcaggcagctcacaaccacctgtttacagctccaggggatctaatgccctcttctggactctgtaagtacctgaactcgccatgtacatatcctccccacatatggattaaaattataaaaagaaatactaaaaaagaaaagttttatatacatgtcactagtttaaaagacctattttgactgatggtatacatttattaatgctttgtgattatatgaatattcctggataagtacagtgctgattataaattacattagtgagcagtggttccatttaataacaaaatctatacatcatatatgccaagaaatattttacgagttttatgttatgttcttaaacaatttgggtaggtacaataatgacactccttttgcagttgagatgtgggagggtaaattcccttagttcagtggtgttgtagctatgagtcacctctaggtggtgtgcctcagagtcttgcccctggctattacattacagggttttacttagaggtgtgtgctactattctctcagtatgcctggccactgagagaatgatgaaatacaaaattacatatatatctcctggattttgattacttttaaaagttttgatacatcaaataagagtgtccactggaaacttaaacagcaatatcatgtgtatatcctaataatttaagtttattcactgttagtaattagggtttttaatttctatggggaaaatatgaaactaaactcatatcccatcccatgtaataagtagaatatttttaatatggtgattttgtataattgaattctaaatggttgttttacgtgatttgtgaaaaatagtgctataattctatcaaatcatttgagctggattgtgtctgttttaataaggtcacaattattttacatagttagtatgtattagtatcctaatccatgttagcatggactgttgaggataggtttccagtacatgagtatttatgcagtgttctccactggcacatcttttatcttgcatctaactttctgcttctcatagcctagagctaacaacctaacctaagacaatcagatatttatcaccctacttcattgttaagaggaaaagacttgataaaagaatcttttccagttagatatctgaacaaatgtagacatctccaaggaaatacagaccagaggctattgggacattggatctcattttggtccaggcacatacacccccccccccccgcaattcctactttggtaacagttttcagctgttaaaactacagtgatggttcctaaccaaatattaatgaataatggaataaagtttatatatgtggactgatttaaaatgaagatatcaaatgatgtaatttgatgcttgatgaacaactttgggagaccctaagttgactttatattaccctttccccaatatgatccatttgaatagactgtcaaaaattttaggtggaaaagatacaatattcattcaaacaacctgagagctaagacaaaatatcatttgtattttttaaatagtgacaatctactcaaaactgtttagattatttgttgtaatatgggaaataaattattaagtaataagagagctggcaaagaccaattctagaatcatcttaaataagtagaactcagaactctttttttgttttttcttctagacagggcttctctgtggtagactgtataagctagatttttatgataatgttcttgtagtgacaaaattgcctaaggacatatatatcagagaacatctctgacaataggcaaaacctagcctgactttgtgtgttggtaacagtggatttcaaaataaatataacctctagtcaaagagggtaagaaagaagtagaggcacagggaatagtagataataagttaggaaaaggtttatgctggaaattttatccctttgttcctacagtatatttcgaaagcttatcagagttcctcctaaatttgtatgtatattagtgtccttagaaaaatttcttgttgcttttttgactttttttcaatcagaaagaagctatctcttaaattagttgaaaaccatgagtgtaagtacaaaagaaagataacttgcttttaatgtattgattatgtgcttaaatgcaagtactatctttcaaaataagattatggaggctggaaaagatgacttagtctgtacagtacttgatgttcaaactaaaggatttgagttcagatcctcagaaccctgggtgcagtggttcaaacctgtaatcccagtatttggattgaagagacagaaggatcctgtggtctcttttgctggctttcctgtaccctttgagcatacacacacatgcacgtatatacactgcaaacaatagccttatggctggttgttaggagctgatattaaggaatgattacaggaatcattcttttgttctaggtatatagctccttaaaaatctaggattttctgtttctacttcctagaacagccttgtgatactttctttacctgaactctcattgctggaattaccgcactagtgacagaagtatacagtcaaattcccatgatcagctggaaaagacctagctgggaacccttaggctatagagataatttgaccaacgtagtccttagtcttcactgtgctcagtgccatgccattgtttcaggctaggaaacttttcctgtattgggcctagcacagtggcctttttgttgtctattcatgcttgttgagtttgtgtcctctgtaaggatcattcttcagaggcaaacttcgttgaattctttggaacttgaaatgggatatttaataaggccaacacatctagctgaagtatggattttttttcagaatttttgtgggaacctatagaagaggttctttgttccccacttgaactcccagaaaacatttagcacccttctccagatgtttataaggcatatctgaaatctggtggaatactgggataagctccatgaaattagagattctttttctttttctttggtggtggggggaaaggttccaactgtgttcccagcacctacaactaagttagagaataaatgagtatactgtaagttcattcatgttgtaggtggaaaatgacaagaaaatagaaagcaaattaggaatcttgattgaaaaatttgacactcatttttagtttagtggatagctcaattgctgagtaagtgaatcaattcaaaattaataaaatatttcaaagagtactacatattttattagtggaagagaatttttcttccccatttctttctttgatgcaattaagtttatccctgtctgggtttagtgcatttttttaggggatatatgatagattcatttttcatagaacttttgataactataaagcctactgtgggatacatcaagcattttcaattctaaagatactttaatttaaaagatacaagatatttgtggtgtttttttttactataatctgaacatgtaaatacttattatgatgctaaagggaaattaggtttagaaataaaaattgatttttattttaattttatatttttcagataaatatattcagttttgttccacatgtggagaaataattccatgttatgtttgatctttctatatttttcaaatgactttgttttattttatctttggtatgattctgaaattatcacttgctgttcagcttgacagacatgtactagtataaatctattcttgttaacaggagcctttggaacctaaatgctacatcattagttggagattaacacctaacaatgtaaaattatatgggaatgcataattaaatatggaagaatcaaataatgagggcagtcagcaaaggaactactttatgtttttgaataggaactgtgaatttaagtactctggttttataaatttaaattatgtagttcctaagaatagaattaatttatgtatttatttataaaataaataggtgacatcaggtatctgtgtgtttgtgtgttcatgggttgaaatttcttttatctacgtatatacatgtattaaatatttatgtatgcatgtatctttcatttatttaatatgactatcagtccagcgatggaaagtagggggtactagagcatatcattgcaaataagcaaagactggcagtatttgctacgctaatgaaaattgagctccaagagcaaagactaggcttttgaaatgtgtccactatcatgagctttaaggcttcccagtacttaaaaagagtttttaaaaaatgaaattggttaacagtagcaaatataactaactaaataaagtgtttccactgtgaaagttgaactgcttaaatcagtaaaccaacatctgtatgactaatgcatgattcttaaaattgtgtacagtgtacaagagttattcaaagtggaatctgagtaaatgaataacaaagtgcattgataaagttgcaaatctcatgtcaccatcaatattttagaaactatcccttattttgaattccagtgtcaacccaatactactattttctgagccagtgtggtgcatgtccgtgtaatcctagcactgtccatgattacttgaattacctttttgagttagttacccacaagagttgcattttctcctaatatttcaaacagaacaacatactttaatagctatacactgctgcttttcttactaaaagacagggtgtagctttaaacctgtagtcctttgccttcctagtgctgggattacatgtacatgccaccacactggctcagaaaatagttttttaaatgtacatatgttacattaaatgtaatgagtttgttgtgttttgtttttgagacaagatctcactatgtagccctggctgtcctggaactctcttgtagactaggctggctttgaactcaccgagatccatttgcctctgcctctacctcctgggttctgggatttaaggaatgcttcacatgcccatcaagttgcattagtgtcaaagtatagagcaaaagagtgataaaaccagtggattaaaacataggtaagattaatgtggtttgttagtagaagctgtggtgagtagcctggggaaagcagttaagaacattagtaaagactgtatgtaagacagtaatgggccagtttaggtaaggccaacagggagagatttgggaagtccattctgatttagctccaggtcctgtaagggttggcagaaggcaaatgctaggcttaaacttggtcaaaaggagaagctgctttgtagcaaaagtaaacttttcagatttctatagttgtaaaattcagtgtttgagaattaatattaggagacagataagctaagctacatggttcactcctcctctgcttttttttcttcttcctcttcctcccttttcctcccttactcactcactctgtaaaccccacctctggaattcctggtgatactcctgctccagcttcccaagtgctgagaaaacaagtgagcactgctgtgctggttcgctagtaaggtgtcatgggtcacctgatgtttcacctttgagcctgttttggtggataggtaggagcgcatatgtaaagctgattaagtgtacaattacctactgttagtcaggctctgtaatggctgtgtgttgtatttatttatatatgtaagtttgatgtggttttgagcttcattaacttgtgttctttatttttgtgacatgtttatagcatgtgtagaaggttattttcctagaaagagaaaagcaaggttcagatttaacaaggaagtaaccctataataatcacataccatggaggctgaggcaagaagattgactatatagcagtgaaactctgtcttaaaaaggaaaagaaatttactcttcctcctttttgaaaaacaaaagcattattattggtcatgaaaatggaatgtatatttcacactctgattatgttgtgtttttcctgaaattcataaatactgtgcgggttatttccagagctttctaaaatgtctgagaatctgctttaacaactgtgtgataaaatgaaaactgaacaaagtgtgtattcacttgagtggttttctgaaggaataatggtgtagatgagtgatccaagtatgaaataattaaaaacacagtgtttgggtttctgttgaatattaatttatagacttactcttttttgtaagtcaagttaaaagaaaattgcgtcactaaaattttggaggctaatgttcaggtcatattatgccataatttatttttttaaacaaaaatgacttcattcttggcattaacatatatattctttcttcgtgtaggagaatatataaaaaattggaggccaagatatttccttttgaagacagatggttcattcataggctataaagaaaaacctcaagatgtggacttaccttatcccctcaacaacttttccgtggcaagtaagtgtataaacttaattcaccttgggtttacttatttgcatggctttatgtgttgtatgtgttaatgtgtctgaaaaaccagtgcagaattttggtttacatttaattgcaaagaaattgtcaactctgtaagattttcaactccttaaaatagagacgtataatcttttccagtgcaatatagtttatttttcatatttagagtttaatatgataaatgtaattgcccagttatatacttcatgtttttctttataaaatgtacataaggacctgtgaacttggtcatgaaatgttatgttacttcctacatttccttccagaattctctgtcacaatgtttggttgattgattgatatatacatattttctattagaaatcatttttcagggacaatatgtgtgactggaaggtgaacagaattggggtacataatggaaacccccaaaagtcaataaagaagttataaaaaagaactgtattcagtaatctcaaggggctaaatgttccaacagaataaaactgaaaaaatgtttagaaaaatgaagcctaaaaatacttacttcatactagtgtatctaaaattaagtgataatataagttagttgcaattgttagagattcctcatctctctgatctggtagaggtgtgtgcatttatgtccttccttggtgaacaaataagttgttcaaataccaaaaaaattatttttctgagattattttatgttatactcatatttgcatttcttatgaatatctaacaaaatgcttatagtttacttagaaatgttggctttgtttatttgaaagatgactgtgataataacagtggttatttttattctttcatgttatgatcaagcttttaaatggtctatacttactgacccaataaaaagatcttgctgtgttaatctagaagtaacgcattttgaagttcaaattggagtgtgtaatgatgagatatagtctatagtgttaaaattttcaattagacaacctcctgtactctgttttggttggatgttatttgttagatatatttgaaaatgatagaagagagaattgaactttgtacacataattaaataacccaagaaaatcctagaaaacatttaagtattataaaatttattttactatatagaaacgtcaaactttattttcaggtttaaaaataaacctaaaagagaatggaattacaaataattgaagaatactaactttatcagattttaatcatgccctttaccctcctggataagtctcccagatcctccctctgcagtcatgtcagtgaatttttatgtatagaatttttttattttttgaaatgatagtgccctatcatcacataaattatacatatacatgtgtatatgtgcatgtatctgtgtgtattaaggaaaacatcattttctccatcaaaacatgttcattataaattgttctagaacgtaagaaatcatttaaaatccttttcacaattcttttgaattttaaattgctttaaggtatgtattttcagtttaaaggtattttgattgaacatttgcttattaaaatggtagaaattattaatcttttaaacagttgccatgtcctgcctaagtagtttgtccattttactagcaattctattggtttgtttaaaataatttctaaaagtatagaaaagtctctatctgctgatcaaaatgcagcattttttgaccttatgaaatttcacaccccaacaagttttaaagacatactgtatgtcacagtctgccaacatctgctctagcacttcccctggcagaggctgaaataatgtgtacttgtggagagagcctacttagtgactgacagcttctccataaaataatagcagttgacatctgtaatttctacttgcacatcaaagtccttgttgggacttgactttcacatgtaaagttgtagttgaacccctgattttcaggattattatcttagatcttaccatgactccattatttaaattttctttatttgtaaaattactataacctaaaattatgtaaataattaaggtaataataccttaattgaaaggagataattgaaagaaatggcccagatttgaactttggcacatgctctgagtatgattggaagcagatcattttttaaaactccgattgtaagattttcttcatcaacatactggacttctgtttgctgctttgtaaggtggagtttgagcaggtccttgaagattaaataaataaaatgctaattcagacaaaggaggaggtattgatggcagagagtgacagtgcttttatgaggtattagtggaaagaacctatataccctattttctttgactgatagttcctcacttgccttggcccacattggagtattgttctcaaagaggctggagaaatggctcagcagttaatagcacttgttgactgtggctcaatgccatctgtaactctggttccagggcatctggcaccctgtggcacatggcacacattcagacaagcaggcacatacacatgcacataaataaacacaaaatttaaaaattaaaagaatttgactagccttaatatttcttagatatgttaagaaatactaaatataccattgatagctacagtttgagtcccctgtttttccactaattaaaaatgttccttcatgggctggcttggtatggatcagttggatttctgctttctgtccacaagtttggctattcagtgaccatataaaacaggtgcagcagagcttgcctttataccaagtttctagtggcagagaaaggctgcttcatggaactcatggcttggccaaccagcctaatctgtgcgctccaggtttagtaggagactacctcaaaggtaggatggagagtaattgaggaaggtacttgacgtctagcctgtgcacacatgtgcacactgtatattcatgtggatacacacataaacatgtatacatctaaatggacttcagtacaatttcacagaagttggctttttactcttttgaaaaagttataatatgaactagaaagatttaaagatttttctggtcttacatttgattttctacccttcttcataacattgtccagactaggggtatagcttagaggtaaagtacacctttagcatatataagacactgggtttaatccccagtatctggataaaataatactcaaagtccttctattctcaatgtttccacttttttttttttattttgagatttatgtattttgtgtgtgagtgctctatctgcatgtacacctgcactccagcagagggcaccagatctctctctaggtggttgtgagtccccatgtggttgctgggaattgaactcaggacctctggaagaatagccagggctattgaacactgaaccatctctccagcccctgattctacttagtctaacttcttcccttatttatctgattgaaaccacttttgatgatttctaatgtgagggaaaagtaaacatttttttcttgctgtggggtgtgttgggttcatggctaaggtccctataaacaaaagacagataaacaaaagaaaaatatacatacacatttgtttaccactgatttttgcctagactttggaaactaagactcaaagaagactagtatgtttttatgctttggatccctcaccacagtttcactttatagccctgaatggcctggagcgtgctctgtagactaggctgacttcaaactgacaagagttcttcttgcttcagcatccccagtgatggaattcaaggcatgtgtattaatgaagaggtagataatcatggagaaatatgactggaaatgtgagttctgatcatggtgttaggctggggagaactgagcaaggcctgtgtgttgagaactggagagatgaggacatcttcccaggaataggaagggcacttgttaaaggaggaactaggctctgctgcataggactcagcaagtcttcaccacactgctggcctcttcaggggaaatgggcccaggagaacatggacagggaccttcatgctttactccccccccccaataccaaggtaatgtatttggctaaaccccctcattaagcttaaacttaattttcaattttaatttgttttctgggttggtgtggaggctgcatttcatctgctgacaaagattttgagatggtctttccctctgtgctgtgaggtttctttctgtcattgatttttttcctttgcatggtatataatttgtgtataatatagtatagtatagtatatagtattaaaggaacacctgctcaggaatttgtagttacaaactgtccatcttactcccacttatcatgtattcagaccaatctgctctcctgagaactatgttgtcacattaatttcactacaagttactgccaccatagatgttttatagcctttactgccctcgactgtcctcaggacggttatctattttccctagatactcagtatttcagttctgcgtctgcttgagctagctctatctcccttctttttctttccttcacatctctaccacactctaaatccatttctagttctgctaattttattcctatgtttgaacctgctacacaggttcaaatggaagaactttaactattttcctagaatgaatcactcatttactctcttaattcttaactagattctctgtttctagcttgtgccactcatgttcttcttcacttgtctgtcaaattgatctttctaaaattacatcctaactgtgccatccatccccccatgtaaaccctgccttggatcttcattgccgactggatgacatccagcttccttaatgtatcataccaggatctcttcaatctggcctctcctttcaactcctgcttcatgtctcttctgctctgtgatgctgtttcaacagtgctgagctgtttataactccctgaaaagtttgctgctttttgctccttttcttgacttctggttggcatgtccttatcttctgtttgtctgtataattttcttttgtcctttaattcatatttaaatttatttccccattcattccttcaaaactattcccttacctttctcaaactgtgtgtgtgtgtgtgtgtgtgtgtgtgtgtgtgtgtgtgtgtgtgtgtgtgtgtgtatcacatttttttggttatcttcttcctgaatatgccccacttactagtctgagttattttaggtgaagtagtttaatcttatatcctagtgtctatatattgtgactttaataatactcagttattcttgaatatctgagcatactttgtaaatttatccttttagattaaaaaatgaagtctttagagtcaatgttttgcttaaggttatcttactaagtaatgatatttaaatatcaagcttaaaactatattcttcaaggctgaatagatggctcctgagttaagagtgtataatactgacctgagttcaacttccagcccctatatcagatgactcataactgcctgtaactccaacttcagggaaattgtcgcctctggcttccatgagaccttgtactcactggcacaaaactcatacacataattaaaaataaatgaatcttttaaaaaatgatgcagtactctgctgtcatttaaatgtcactccttttcctcccttcttactagactattatgtgagtcaatgtattatgtacttatcttcttattgtgataaaatgcctaaaagaagcaactgatttattttggctcatagcttttgaggttgtccttcatgataggttcatccttttgctttgagttcatgctgaaagcatgtaccagagtaaaatgctttactgtataaccagggaacaaaaagagaaaggaccaggatactctaaccactttcaagaatatggtgccaataacacacagacttcccagcaggcccatcttttaaaagtttccaccatctcccacgggcgccaagctaagcaccaaacatccaacatgtgtcttgtgggaaatatttatttaaattgctcagtatccattggtacacaaaatggaaattcatgaagtactaatggatgtggataacaacaggtgacttttattgtatgttgagtgtatcaaatcaaatacggagtatgaatgaggtgccttctaaatgcagtgatgtagagatgaaatttatatatttttaaagcaaagtataactcttaaacttatttctcttttattttttatttaaaaacaaccttattttacataccaattccagttccctctccctcccatcctcccgctcttcccaccatctccccatcccacctccatccactcctcagagaggctgaggcctcccatggaggatcatcaaagtctgttacatcatttggggcaggactgaggtcttctcccctatatctaagctgagagaatatccctccatagggaatgggccttaaaaggccagttcatgcactagggataaatactgatccactgccagcagccccatagcctgaccaagccccccaactgacacccacattcagagggcctagttcagtcttatacaggttccccagctgtttgtctgaagtctgtgagcttccacttgctcagatcagctgtttctgtaggtttccccagcatggtcttgacccctttgctcattactcctccctctctacaactggattctaggagtttggctcaatgcttagctgtgtgtgtctgcttctgtttccatcagctactgggtgaaggctctatcatggtatttaaggtagtcatcaatctcattatcatggaagagtatttaaggtagcctctccactattgcttagagtattagttggggtcatccttgtggattcctgggaatttccctagtgccaagtttcatgttaagtccataatggctccctctatcaaggtatctctttccttgctctccttctctgttcttcccccaactcgatcttcctgatccctcatgttctcctcctccccctgtccatgctcccagtttactcaggagattttgtcccttttccctcctgggggcatgggtattcaggtatgtctctcttagggtcctgtttgtttcctagcttctctgaggctgtggattgtaggctggtaatcctttactctgtgaaacttgacttatttctaataatcatagattgaggtcatcattgaggaaacatacataatggattaaaaaatgctgctaaaaccacacattgtcacaaggtactttaaccaaagtagcttttctgtccagtagccatgatctttgatattttacagctatcattttttcactgaattcatagattgttaaacttcaaagtggaaataattcctctatggaagactgagtaactgcttagatatctttgggctcatccattttctgcacggttctgtcttaggctttgtggtaggaagcagggagagtcaccaactgtcccaagaagcacctcttaggattctgcctttctaggtattgtaaatgttggtccatcctgaaaatgtctcttttctaaaacctctctttaatatcttttattaaaaaaataggacacctatatttctagaccattttaaaaaaaatgttttctatcctattttttccttgttttgaaagtagaaaaatatgagtcttaaaaccatcagttttaaaggtttgttgatcattttatttggtgcctcctggattgtatcataaagttttttatataggaatttgttaacattgcacacatagtaggggaagaaaacatgggtttagatgccaaaattaatttttaaagaaaataaatgtcagaacttgtgaaagaagcaacatatattatctgtggttacttaagagtttatttttgagttgttaacatagaatccagatgagagggttttgaagaaggaaaggtattgttaagtacacaagcattttaagtcagaaattaataccttgcttgagtatctggtaatattgtatggtaggtgtgtatcttcaaatgaacaagctgtcaatcagctctttctgttaccagccagctcaggtccttattaatcttaagttcagatattctcttctgtgtaatacttggaagcaatgcataggatatgtctaggacaatgttgtgcaaatactgttccttctctcaggaaaaaaaaaatcttggagttgctccatttttttttacacagggaagctgaattattactattttttacttactccataaacacttacaaaaataaaaattatgtcaatgtttatatacctcatatcttttcaatatttctatatatgtcttagtattctatagttattgttgtggtagtggtggggattaaacccagggcctatcacatatttggaaattttgctgataaggtacaccctagctcttcatgattgtttttttatgtaaattgccacattctgttaagttaggtgccatgcctattcataagtatctttactctgaatgacttcttagactattttatgtacttaatcctttgaaggttggatgtgtttttattactaattgtgaggaaacttagataaatggggaattaagtctagtagtaggtatatcacactgtaagaaacagatgccttatttaaaaattaatcagaaagtgacagtataaagttagtcaaatggctttggaaggaccaagtttgcaggctgaggaatgcccttgtgacagatgttgcctctatatagtcagaagttgcctttttcttttcataattttttagtgtctttctaaatcttttaaaagaaattctggcttactatctactgggaataaattaagttgtttgtaaattgaattactgctgctttagaaagggagaggatgtggtaggtaatggttttaaggaaaccacgccaggactggtaagtgccatcatcttacaatctgactccaggatggaagtagactccagcagaagtagcttcctctgctcctactcttctctttctgccaccactttcccaaggtcagtaatctctcatctatcataagagatggcctatctgtaattgttactgagctacttttaagtacttttgactaactttttccttgtttgttcttgtgttcctagataacaactttgcatacatgtactctgttttgaaagcctatcatgtgtgctaacataatttggatatattatgaaatttaatatgtgtatttagtctctataggagcagagcaaatagagtagaaacacatatatatgagatttattagagtggtttagaaagtagtggaatgatagctgtctcctgatggcagttgttcagtccatgagactggtgtctcagcagtctcagtctggtgcaggagttctaggaagtcctggggagctgctggtcttctgtctctgttgggatcctgaagaagaagtttctaataagcagtgaaggaatgcctcagcaacaggatagatgaacttgctagtgagagtgaaggtaagcaagcaaaaagcaaaagcttccttctttcatgtccttttatgtgggctgccactaaaagttgtggcccagatttagggtgggtcttcccaccttaaatgatccaatcaagaaaaatccctcacaactgtgtctagctgcttgggttttacttaattccagatgtagtcaagttgaaaaccaagattagccaccacaatatgtaaatacatatttaggaaacctaagttcttgtgaatatttagaaagtttttttattgggagtgttatgttctatacattgtaccaagtactcagagaaataaagaaggaaggaaaacaacttttaaaaaaatgttaccatgtggtacaccattacatataatgttacctcatctaatccttacagtaacactatgaggtaaatagtgtgttttctattttgaaaaggtctagaaaattgtgacatgcttatttgatagttgtcagagccagaagttaaatgcatgactaacaatgcaaactttgaattctgtgttaacctcagtactcaacagatagcaggtaatagtcattggatctgaagaatatgtactgtagtggcaaaaatgctccgtgacacttggcattagtgcttgaaatgcttcatgattaaaatctggagtaagtttgacaattaaaatatgaagtttaggaaagggagattcattagaaactggactattagaaaaatctctttgattgagattgagattatttagaaaaataacatttttagtaacatttttaaaggacaggctggattctaggtaacagtaccactctaattaaaaaaagtatttctcagaaacttgggctgaatatctttcctcttcaattaagtgggtatgaaatcctcaggaatgaatcaaagctcgacatatagaatggataatactggaggaaacgtgtgttttaggcttacaattgctgttatgaaacaccatgaccaaaagcaacttggggaggaaagtgtttatttcattcatagttccatataacactttgtcatcaaaaccattgagggcaagaactcaggagttgagttcaggaacctagaggcaggagctgatgcagagaccatggaggcatgctgcttactggcttgctcatcatggcttgctcagcctgcttcactatacaacccaggacctcctatcccggagtggcaccacccacaatggccttctcacatcaatcactatttcagaagatgttccacaggcttgcctacataccagtctcatggaggcatttctcacttggggtccttcctcccaggtgactctagcctatgtcaaattgacataaaattaaccatcttagagggataactaaaagaaagaaacatgccacttgaaatagttaatagtgcttaatcaccccagatattccagatatttgttttcccaaagctagaattaggccctaggaattctgttaacttacctggtgttttgcatacagtttctctattatcattgttatttattgtcttgttattaatacagataagtactgcattttatttatttatttatttattattttttcaagacagggtttctctgtgtagctttggagcctatcctagcactcgctctggagaccaggctggcctcgacctcacagagatctgcctgcctctgcctcccgagtgctgggattaaaggtgtgcgccaccaacgcccagcttaagtactgcattttaaatcccatcttagggtaatgtttttaaactaaaaatgtttttaactaccatttttaacttggaaaggatagatgtctcttgaaatattccattcataaaataaaaaccattcttttctgtaggggtggtgtagtaatgtgggtagagagaggacagtttgagtatcatctaaccaatgtatatgtaacaagtcacacatggtggacttaactgtagagtttgttttgcattgagtttcttagtgataggtcagtatttttcagttattcaagccagaatttattaaatgtataaattactagataccaagccaactttgatgaagagctaggatccttgtattatgcattcttgtattttcttctatgatacctttcataatgataaaaataattctgttcctttccaactgcaatcagttatgccctgataaatctatacaagatgtctggttgagtatatatggttttttatgtaatttagtccttgactatttctttttagtaaatcatttttgcagcttaaaattttagtgtctagaaagtagagattgtgtgtggtttaaaaaataataatgagaatcatgattatgtgccaatcataactggtgctttaatcccatcttaaaatttaatacatagagaattgggactcctatgagtaaggaaagaattgacattagaaaaaaatcatactatgtattacttactttactttttatagatacatttatcataagaaacatgataaaaaatgtcattccttttaaagaaaaactagattataaagcagtcctatagacattgaaagtattcttagagtctcaaagcaagtaactctcttaacttgaattcagtttgactatatatggagttaagcttcttcaattaatgagtagtcaatacccacaggaacacagatcttccccatatgacacatggtgcatcaatacagattcttatattctcaaagtatattttgagtatggtgaacctgtttagggtagatcatggtgaattgcagaggtagcaatcaggtctctgattattttataaaaaaatatttgtgtaattttgaccagatcgcataactgttctaaatcagaattttgttatatgtagaataaaggagttagttgaatcatctccagagtccttaacttttaaaaattcttgatttcaaattcttaaaccattattcaattgagactaatagtaataaattaccactaattaagcacttgcctgttatgcattgtacacatatgtcatatttttaaagccatgtcctcaacatggcaatactgctctgagtgcgagaactgcgagcacacccatggtgctcagtcattggggccagtgctcatactggctccctcctcactgcagcatgtccacacgcttagggctttagggccaaagtttttctagtggggacttcagaagtttagggcttactgtgcctcttgactattttgtcagtgttaagaatcaaatcttgtaattctcaactagtgtataaagatatatgtcagaattttaggctactactatttaagaaaagtaaaacattgcagagaaaccactagtatgcaaagctttcagcattgttcttcaaattacaacagaagtcacagcacagacattaagtttcagaggaaagacagctggatatttttgataaattataattatcatcctttttacaatttgtatttgaggttgtgttttgtcgattctccagaatggttattgctaaatcactactgccttactgccccttcctgtgtctttgttgatttaaaaaacatttgttaaatttctagtaatgttaaatgaggcctaaggccagagtggaaggaagggcctttcaacctcagtatttagaaacgatatagaagaattgttttgggttggaaataatacataattaagcagatgctaatgaaaaaatgcaatgcagaggaagagaaaagagattggggtgctgtttggaagttccatagaggagagtacattgcccctttattataacaatgtttctgcactataataaggcctttcactgcaagttcagcctttttcattcatttgttttgtgctctgcttcctctgttactaattgtcagcacaatagtcttccaactatcaagtctcagtgtccttttggaccaatttgtcattgtctttctctctcaccccccaacccatgcactcagaatctattaaccatggttgcatttttagatattttgtatgttttaaaatggcagtgcttttgaaacatgccagaatagttcatggtaattgagtcatctaactcgcaatagttactgcttccaaaatgcattctgacagtttctataggctattcttataagacaacttaaaaatatatatatatatatatatatatatatatatatatatatctttaaggcaataatttgctaattctttttgaacttcattgtagtttgtgttatttacatacttattgtttgctctgtaaattattctaagttttgtgactttactaaattgtatatgttatttacccattgataactccttatttttatagataattttactatgactaaggaataagcaaattgtcatagactggcagagttgaataaattctgctgtaagattcaaacataaaaaagattcaaacatagcttagttgagatacctccttcctcgaattcacaaaccccaagattcagtcccaacaccttgtcagactgggtctgatggtgcagggctgtaatctcagcactcatggtagaaaggcaagatgatcagaagttcaaggcaattttcagctaaaaagtgtgtttgaggccagcctgtgctacatgagctcttaaggggaaaaagatagtaaacagaaaaaaaattttaaagtagtaaattgcattttgttataaatgtcatcaaaatatatgcttaaaatggttaaagttttagattacttgttataaatattaccagattttttaaagccatggctaatctattgcaataaataaatataaaaaacattatgtctaattccttattttgagtctactaaatgtttgtattcttactaaaattctctcagtaaagtgttgcacatcacttttatgtttcaattattgtttcaaaataaccacagtatatttttactagcaatttcatgtatgcaaagaatggttattctagaaaatccttaagagatgtatttgtttcatgaaaggcagaatgtggtgtatagaaaatatgaaaagtattgatggatgaaatactgactcccaaaatttactttgggtaaatagtggtaaatatggtaaccatattcattaaagaaaaatttattttgagaggttcaagatttaaatccacaaatagtatcccatgtaactactaagtagtatttttaaatggtatagtttggaatgcaggtcataaagtatcatagaaaataatgttagtaaactgatcttaggctcctcattattgactatgttatgaaataaagaataaagatttattttatctatattcttttatgtggaaaactatatgttgtctttggatagtgcataattggctcacacagcagtaactagaagtatggagctggaagtaggcaagtttagggatcagttatttgccattagtaagtaaacatgtttattgccatcaacttaattgtaagtgtacatggtgagacccagccgtgaagactccagagagactgactgatgtctttctccttggctatactttacctgagaaacaatcaggaccacagagcaggattctaccagggaatattccttgtcctgttcttccttgtgcagtgtcagagccaggaaaaaaagacctccaacctcttctttcccacaatattgttagcagatgaaaatcatcctggattatcatagatggagggaaaccaagcccagagaaggaatagaaaggacaacacagtggctaggtctagtctctttgttttaacagattactcagttttcaaagacaattttcagaagagcatgggatttggattcagatagttctgggatacatcttttaacagtttcatacaagctgtgcattttggacaagttgtttagctagttgagccttatagatttgctcatttataaaacggggcataatagtagtctttgggtttgtgctttgaggtagaaacattcaggagccactcagagtgcagcatgattatcattcagtgttgtgctgagattgttctcctttgggcatcaacttacctgtctttggtgcattaaatgattaccttttaaggtagcattgtaattggacattgtgtccttttgtttgaacagtagtgaaaacattaaacaaaaggaaatgtattaaatgaaaatattatacttcaaagtttaaaagtaaacttacagttgacatcatttaattattcaatataaactgtatatgtttatgataaatggaaggtatttgtttacattgactatcagaatttttttgtttaattttgagttctttgaatggagggaatatggtctcaatttcttgtcctggctatcctggaactccctttgtagaccaattcagcttcaaatttatagaaatccacctgcctctgtttcctgagtaatagaattaaagatttgtgccaccatgcccagccttagcagaatgtccttaaaaggataaaattagtatttaaaagattaaaaaggctgacataaacatcttaaactttttaatataatctgaacagatgatttctcagaatttcttttgaagattatatatattgatttggcatgttacagtcctgttaattggctttcaagtttgcagaaaaattagaatttcgaacaactttgtcatctgtggttcagaatggtgtaaagtaagcagagtgtttgaaattcagcttgtagttggttactctggagaggtttaactagagtaactgcctaatataacagtcagtttgcctaatataacagtcagtttaacagatatttgaaagtaagcttcatggtggaagtagaaacaaacacccacaactaatcactgaactgaactggaacccagatgcagagaaggacgagtgatgaacaaaggagtccagaccaggctggtgaaacccatagaaacagctgacctgaacatcggggaattcttgctccccagactgatatctgaaataccagcatgggactgagccagaccccaggatcatgggtttcagtgaggaaacctcggcaatctatgggacctcctgtagtagttcagtacttatccctagcataggtgtggactttgggagcccattccacatagaggaatattccctgagccaagacacaccagggtgtgcctaggccctatcccaaaggattcgatagactctgatgacccccctatggaaggcctcaccctccctggggagcagaaagggtatgtgataggtagggtttatttgggggaggtgataggggacgatgggagggagaagggaactgggattgtcatgtaaaacaatcttgtttctaattttaattaaaaaaaaatctgaaaaaaaaaaagaaagcttcagggttgaaagcagaaagacgcgtagtgcccccctgctgtggactccacatgcccacagaggcacagtcatatatatgcatgtgtcacatatcgcatacatacacacatgcctgcacataggaataatctgaaaacttaatatttttggcataatattgttcattttacagagtcctgggttgtgctaatgatttcattttaggttcagttgattttggttaggatgacttgtctactgatgacagtaggatatggagatcacacattattaggtttccaggacctaggtgaccttttatgtccatcagaactttatgaaattgggaggccttacatttgatgtattttatttataattaatttatagtcttgatgaattattctcattactaatgtagtggctctctatgatctcttcaccaattttactgttaagtctactttattagctatcagaacagctataacagctcatttacagtttttgtttgcttggtaaattgtttttcatcctttgacccagtcttttggtccctttaccagtgggatgtattttttggaaacaacagatagatttagttttttcaattcagtctgacaaactgtatctcttcattggtgagttcagtttatttactttttacgttaatattaagatacattcatttgttattacagttttgttaattattttttctggtaaacttatgatattttcattttccatttctatattttagtatgttgtactttggcagttgatgtactaccagtcatttggaagaatcatgacaccttagtttttcatatttcttgtgtctcagtactataatttgtatgtcccttagtatggctttatcttctggttttatttactcttgaaggcttaatcctcagtgcaatttagagagcaaaaaccaagctgctttaacagcatcaagtattagaaacacagatatatgcttaattgtggagatatattgtttatgaactaataaagcttgcctggagatcagaatgcaaagctagccacagccatagaagatgggcagtggtggcacacacctttagtcccaggactcaggagacagaggcagatagatctctgtgagttcaaggccacccaggactacatgagcgtgaataagtctaacagagaggtatataagacaggaggagcagggcctggtattctgataattagtctccagccacattgagggagaggatctttctttcatccttggtagaggtaagagctctctgttgacttggctgctttgcttctctgatctccagcttgaaccccagtatcagtctccaggtttttattatttcattcaacacttaatgtctgtttaaagccttggaaaaactgctataatgtgctatcaagttaaacattaagtaggataagtatgagcatacttaatataataaagtcactgtcttagttgcttttgtactgtagtggcaaagcaccatgatcaaggaaatttacaatttaatttgggtctcacaattccagaggtttacagtccatgacagtctagacagggaccatggtggcaggcaggcaggcaggcaggcatggtgctggggcattagctgggagtttacatccgatccagaagcatgaggtagaggagagactcattctctctctcatacccctcccccctctctctctcagtaaatgaaggaagggaaataaagaaaaatgtaaaaatgtatgttttaatctaatgcattcaagttaaaatagtattaaaagtagaaagagaaaagagaagaatcatacagaagcaaaacagaagataaggaggaagataaaaggtgactaacaacaaatgcataagattagagtaatatataaaaggaataacaaaaatcatactgtgaaaatatactaaataaaaatattattaaagtttagttttaaaaaagtggaagacagagattaaaagaaaagttgaagtatcagtcagctcctctctgtgtctgtggaaactggaatgtgcaagtgtgtgtgttgggagggtctgacgaacttgtgaactttcatcttttttttttttttctggtttatgctgttgcagagtctgtagtaggttaagtgtctgatgtctgcctgaactgtcttcacttcaatagcttcctcttttcctcttgttcatgtgttgggacctctgtgcaccacacttaactttgcagtctgtgggctgggcaggttatcccaccttactgagatactacccctgtcttggtgtatatgctccaggggtggctaattttctaggcagtggatgctctccaagtatgttggaactgtagcagtcagctataatactgtgctttgtgcaagtataaatacctgcccttgtactttcaagatatgtggctccagagttttgtcttcctgctaacctcaaggttacagcttgcactcttcagggtgattctcagttaatgactctgttcccagcatgtcctcatcttattggagcctctttctacatacagtctgctactttgcagtgtctgaccctcattctgttcaactgctttaccctgggcttgtggcgcaccaaattaagattccttgacctatagttgttccctttatgctgtctcccagcatggctcaggtttgtttggttggttggttttacaataggttctcttttaagacagtgcctttgccactgctcttacagtcatgtagaataacacaatagggtttctctttacctctgacctatcacttgaaacaatcacactgtcttatcaaactcataattggattctaggcttgtgtaggttgtgggcttttactaagataggactacccatgtcttgattggcttactttagaagtggcttctgctttcctttcccttgtgagagaggtatgagactctaaaattcatatttttaaccattgtactatacttcttttctttgaagtcttcctagatattccctggcataatcatgactgactgattgtagtgactgtatataccaagaattacaagcagtttattgtttcacaagacttcatagggtaaagactaccttcttaatatatttgatactataataagatggcaagggaaagacgaagggcataattataaacaatgaaactatagaggaggaaaaatggcaagtctgtgtctagagatctaaaaaaaacgaaatgagcatgatttcacctacacattaaaggtttggtattgctaccacagttgggacttgcaaattgatagcagtaaaataaataggtatttcagatggtagaagctcctaaagcaaagttaaagatacaggaaagaacaagttgtgtttggaaaaattgaagagtctagttgaactgattgaactgaccatagtggtaatggcctggaaagaaatgctaaggttaggttgtgaataacctggaacctatggagagctgtcatttgcagtgtgttctgtttagaataacactgtgtagttgtcaactgtttactaaatggtttaagtacttgtatatttaaagatatatttgatttgatttattatagaatgccagttaatgaaaacagaacgaccaaagccaaatacatttattatcagatgtcttcaatggaccactgttatagagagaacatttcatgtagatactccagaggaaaggtaagagacttgtttatttttattatgttcaagatagtctaaagatgtatttgtagctggtttatttgtaattagacataaatacatttgcactgtgttacactttattctgtttctgttgtcttacatgttttactggggctggaaaatgacccttggactttaaataagctttttcagagaaaacagcatacaatattttaaaaacttgaacacaatttatatacaaactatctttatattatgtatagttgattgtactcatgtttgaaattctgaatgaaatatggtagtaaatggtttcaagtagcattcctgcttgtatacatattcatttcaggtggcttcctgcattactattttgagaaggattctgaggtttgtgtctcaagtttagaatactagtaaataatatgattaattagtgtgactaattgtttggtgattgatgagagcaacagcaccatgatactgatcagctctgtgacatctatggggccatatttccattcttttgatccgtactggttttgtacctgttttcccactttctagttctatcttaatactcttttatctgatggcttgttaatgagttaggtctggcaacaccaatcaccaagttgttttcctacaaatgttattgtatttgaccctaatcaacaacttttcaaagtagaatgttaatagtcttcttttctaaatggataacacatgctaacaggcctccctaaggatttagtgaaaacaaaatcatcttttaaattcctaataaataatcagtgacagaagtttttgaaataatgtattactgaaccaagggttttcacatgctaggtgagtgcgctatcattgagctacagacctagtcctagcacttttttttccaattttttaaattttaataatattttcaatcactcaattgggatgtgtcatttctttagggaatatataatagaaaaataccagtttggcactgataatagtttactttctgtatgtttagtagtattcttggttttggagtgcatacaggctgtgtaacccccccatcctcaattttcacttataattatgttgaactttacccatatctaccctagtctttctgcactgggttcttcatttgtttgtgcttcacctagagctgtagtcacgatagttctagtgtcctttggatcttagtgtcaagcagcagtttcccccagcacttaactttggtaggctaggtaggtcccttggctacatagtttgactttgttcccttttcctttttattttatgtgtatgtgtgttttgcctgtatgtatgtccatgttccattatgtgtactgcaaaaaaaacgtgaaaaacattcttttacaactcccaacgcaaaacaaaaaaaaaaaaaaaaaaaaaaaaccacaaaaaaaaaactatttgtaggaaaaaaatctcttgaaatgtccttaaaaggctccaacatttaacaggtaacagtgtaaaaccccagagtcctttctttaaaacaaagtgggaaaaattgggaaggaattattcaaactttgtcttctttccttgtggcttgaagtctccccctcctcctcctctgaggccacctcagaagcctcttctacctctaaagcctccctggcctctgccgccaaattcgcctcagcctcctcctcttccaccacctcgggcccccaaaacctcctctgcctccacctcagccaccaaagccaccttcacccttaggtttcgcccagtccaaagtaactttattcccatcaatctctccatcttccatggcctccttggcagctttggcatcttcctcactattgaagtctacaaaaccaaatcctttagaggaaccagtttctcaatcagtgactattcttgcacgaacagagccctcaaatgattcttttaaggtctcttcagtggtatccttagacagacccttgacaaacagtgttttggatggctgacttctcacattaggtgacccctgggtccttgtaactccaacctgattgttctgccctcaatttccaatttattacaggaatttaaagcttctttagcatcttcaaatgaagcaaattctataaatgcataccctttagatttgccctgttggttctggggcactttgataaaagttgctttctcaaactcttcctgaagagtttcttcttttgcactgtaggagagattacttaaaaccaaagtttttgattcaccactccaagtacaattcttttcagttctttcttgcctttgtcccttctccccagtatagtagagtgaaacagaacgcccatcaatttctgttccctgcttttcttccaagtttttctctgcatcagcttcagacttaaattcaatataagcaatccctttctcttcccatcctggctaaccaatctgatctccaaggcatcttcaaacacttcttttaattcatcctcagtgatgttaaaagaaagattttttgctaaaagtgttcttgcagctcaaacttttttactatctcttccttttggtttttctagtttaatttcattgccaaagacttttaaactggtgagctccaaggccttttttaggtgttcagctgactcaaagtccacataaccaaatttcctatttgtaccagttctgacatccacaacaacaagatcatttttagcaaaaagttcactgatggcaccttttagttcagcaacagacttgtttggattaaggtttcctttcaatttgaacagattgaaaggtgtagttgattctgaaccttccactttctgtttctttgcttcaggaacttctttctgtttggtcatttccttcttccattttccaggtgctggtttaacagactcttcctcttcctcttcctcttcctcatcttcttcctcttcttcatcatcctcatcctcttcagccaaattcttggctttcacaggaacaactttgcaggagctttctttcctttggcaggtgtgatctccatagctgctgcttcttcagagtcatcctcctcctcctcttcatcctcctcctcttcttcatcatcttcctcgtcttcatcctctgaggcaggagcagcagcagctacctttgcttgttttcctcctttcactactggtggctcaaattcatcctcttcctcatcatcttcatcctcatcactgtcgtcttcatcatcgtcgtcatcttcatcttcatcactgttttccttcttagcattcttaccattcttagcccccttggctggagtgacagctccctgtttaccaggggttgctgccaatgcttttgcttatgtggctcccttctttccaggtgttgcgactgctttggctggtgtaaccgccttccttggctggtatggctgctgcctttctgcctggagtaacagcagctttcttagctggtgtgggaactgcaactttttttgtttgtgaaacaaccaccttctttgctggagctgttgtagccttctttacttttttctgagcgatgacaacctcttctccactgttgtcatcttcttcatcttctgacgtttcttcgtcttcactatcttcttccacctcctttggaggaggagccattttcttagaattgccgtgggttttgccggcctttgcgagtttcaccatgatggcgggttgtgatgacagcgcgtgtggcgaagggcgcagctcaggagagcctcgaggaagccacgcgagctgggaggcagcgacgggcaccgtggactctggagcacgtacgaccgactgccagctacagctccaagtgtatcagtcttataacctttgtttgcttttgtagccctgttgacaacaaggatcattcatcagttgatagacatgtacttgttttgttttatttttttctttaaagtcttcagcacacagtccaggatatgatgacaaagtgcttacttgatgactgaattaatgcaatgctctcctgttaatttaacatttactgaagcttgatttgttgttcccagagttggttgtgagccagatcttttaaatttggggtgggaggagatagacagtttcttgctctgcagtccaggtcagcctgaaatttaacagtatcaccagagtcaacttcagacttgtggcagttctctgccttaacttcctgaggactgagatagataggaggtatgaaatacacagatcttaagcctcaaaagtcttttgacattcctgcaatattagtctactcatcggaagactcagttttcagttatatttatgtttaagaaaaaggtaattcgcctattgagtgtgcgtattgtctgtgttcatgaagtatctactgtctggggatttcatagctttcatctaatgtcagtaaggacttagaggtgcttggggtaagaaattctctatgtaatattctggccctagtctgaaattcttttatgttgtaaactaaatggatctctgtagagtgtgctacatttattttagttgataatataagattaggcaattttttcaatgtgggtagcctaataaggtcacagatcttactttttcacaactattaaaacacatgtacatgtgcatgagtgtatgtgtctgtgtttgtgtgtatgtataggcttttagatatccattttctttttggtttttcgagacaaggtttctctgtgtagctttggagcctatcctggcactcactctgtagaccaggctggcctcgaactcacagagttcgctgcctcccgagtgctgggattaaaggtgtgcgccaccaatgcccggctattcattttcttttttgccttcatttttctgttgtccttagtagtactcctggctttaattagaacaactttattaaaccttagcttgaagcagtttcccatatcttttgtttagataaaatgttctcagatattttactgcaatttgtttttttttcaatttgtttttaaaattaagtttgttaacttatagttgaaaacataaaattatacatattagtgggtaacatcttattttaatgcatgtatgaattttttaataatttattttatgtacattggcattttgcctgcatacatgtctatttgagggtgtcatatcttggagttacagacagctgtgagctgccatgtgggtgttgggaattgaaccctagtcctctggaagggcagtcaatgcttttaaccatggagccatctctccagctcccacatacacaattttttatacctatctcctcaaacatttatttaagataattcttagaaatgcacagtatattattatccagtcaccccactgcatgctagcatatcataatttcttctccaactgtattcatatttactaatcagcctttcaccatccatctgtcccctcatacagtctctgtagcctttggtcattactactctcttcaatcttagaaggtaaaacctttagattctttatatacgtgacataatgtcctttctgtgaccatatttcttggcctaatgatctctagttccttctacgttgccttaaatgatgggattcttttctttttttaagagtgaagaatagtctactctgtgtatatgttatatcttctttattcattcatcagttgtagacacttaggcaattgccttttttaatggccatttaattctgtgggataaatgcccagaaatggatgactggatcagagggtagtttttaagattttgaaggatttgctatactccttttcaaggcacctgtcactaggaccactgctaacacctattgtcatctatttccttattataatgtcctctatctcagggtgtgagatacaatctatgtcttgaatttgcctgaagatggaaatgctgacaataacctttgtataactttggattctttttatggctttgtagaactgcccatttaagtcttctgttcattttttcagattttttttatttgaattagaaacaagattgttttacatgtcaattccagttccctctccctcccctcctctcctaccaccctccaattaaaaccctacctatcacatttcctttctgctcccaagggagggtgaggcctttcataggggggtcatcagagtctgtctatcctttgggatagggcctaggcccacccccatgtgtcttggctcagggaatatccatctatgtggaatgggctcacaaagtccacacctatgctaggaataagtactgatctactacaggaggccccatggacttccaaggtctcctcactgaaacccatgttcctggtgtctggatcagtcccgtgctggtatcccagctatcagtctgggaaccaagagctccccgttgttgaggtcagctgtttctctggggttcaccagcctggtctggacctctttgctcatcactcgtccttctctgcaactggattccagttcagttcagtgattagttgtcagtgtctgcttctatttccaccagctgctggatgaaggctataggatggcatatgagtcagtcatcaatcttattatcaggggagggcatttaaggtagcctctcctctgttgcttagattgttagttggtgtcatctttgtagatctccagacatttccctagtgcctgatttctctttaaacctaaaatgtctccctctattatggtatctcctttcttgttttcttctattcttccccgaactcaacctttctgctccctcatgtcctcttcacccctcttctccccttctcattctcctagctcccaacccactcctcccatgctcccaatttgctcaggagatcttgtccctttccccttctccaggggaccatgtatgtctctcttagggttctccttatttactagcttctttggccctgtggattgtaggctggtaatcctttactctatgtctaaaatccacatatgagtgagtacattccatgtttgtctgttagtgattgggttaccttgctcagaatggtttcttctagttccatccattttcctgcaaatttcaagattccattgtttttttctgctgagtagtactccattgtgtaaatgtaccacattttctctatccattcttcagttgaagggcatctaggctgcttccagtttctattacaaatagtgctgctgtgaacatcgttgaacagatgtccttgtggtatgaatgtgcttcttttgggtatatgcctaagagtggaattgctggatcttgtggtagactgattcccattttcctgaggagtcaccatactgatttccaaagtagctgtacaagttggcactcccaccagcagtggagaagttttcccctttctccacagcctctccagcataaactgtcattggtgttttgattttagccattctgacaggagtaaaatggtatctccgaggtgttttgatttgcatttctctgatgactaaggatgttgaacactttcttatgtgtctttcaaacattttatatttgtctatttagaattgtctatttagttctgtaccccactttttaattggattgtttggtgttttggagactagcttcttgagttctttgtatattttggagatcagccctctgtcagatgtggggttggtgaatatcttttcccagtctgtaggctgccgttttgtctggctgactgtgtcctttgccttacagaagcttctcagtttcaggaggtcccatttatcaattgttaatctcagtgtctgtgatactggtgtaagcgattcaggaagtggtctcctgtaccaattaattgaagggtatttcccactttgtcttctaataggttcagtgtggctggatttatgttgaagtctttgatccatttggacttaagttttgtgcatggctataaacatggatctatctgcagtcttctacattccagcatcctgctatgccagcaccatttgttgaagatgttctctttattacatcgtataaatttagcttctttgtcaaaaatcaggtgtttgtagttgtgtgggttaatatcggggttttcaactctattctgttggtctacctgtctatttttgtgcctataccaagctgttttcaggactattcttttgttcatttttaattgcatttggcttttgtttgtttttggttattgagttgtagcttcttatcagaatttgggaactcacccctttcttttcttagggaaaggtgtgtggggacacagagtatcattatgtctggatatagttctaggtagtttgaactggctgtgtagatcggtccggcttcagacttggagaatttcttttaaacaaaacaaaaaactttatacacacacacacacacacacacacacacacacacacacacacacacacacacatttctcagacactttggcccatttcttgagtctcattttcattctgctgtttcctttgcttcacagatttttattggtgttcattttgtggcttgtacttttagtgctaaggtcaaagattactgttaaaacaggaggcatggagatttcatttttgctttcatgtagctttgtagctttaagtctttattttgaagaatatatgtgtgtgtggtttaaaataagactcacatttcattatttttcatattgatacctacttattccaaaaccatttgttgaagaagctctgcttttggctttggcaacctttgaaagatgaccatgtatgcatggttttattacttcctctttatttatttctgtcattctatgtccttacttagattccataatgtttcagttattgtagctttaatgtgtgtgtgtgtgcgctcgaatgcatgcatgcacactcgtgagcacacttttgtgctctttgagcatttcttaaatgtatatgatgttgttttgatcacaacctcctgatcctcccttcaagtcaccctggatcaccctccactctgaaactcaccccaacatcatgttttcttctttttttttaaaggcaattcattgaatctacttagtaccaccaatatgttcatggttttgggggcatctactggagcctgttcttccaagtgctaaatctgttgaggggttgggtcaggtcctccacctgcttcacgtgtggaggggtaaggggagtagggcatttttccctaacccacactaccacatggccgatgagaggggcatgacctcctctcccattctaaatcttcagagccagctttcccatgcccctgtgaacagggtcagctctcttgagctgcacagatgaggtgtaggaccctttccccagagtgcctcagctggtgaggggcttgaccagttccccctaaagttgcagccaatgaggcttgaggccagccctgtaccgccctatcctctaggccttcagtggtatcagggctacatacatgaacacagaccttgtctgcataaggtccatgaactcagacatgggccctagcatcaacccaggctcagacatcatcatggccctgggtggcaatcaagtcacccacctcagccgggtcctcactgcttctacctcttcagatatgcctgtcaatatgacatgaacaattctcctctctctctctctctctctttctctctctctctctctttctctctctgtctctctctctctctcctctctctctcctccctctctctctctctctctctctctctctgtctctgtctctctgtctctctgtgtctctgtctctgtctctctgtctctctctctgacacacacatgcacacaccatacatttgctcaccataataataccctgctgtatggcatcacaaggcacagggtgagctcatgtttctcctcagagcccagagtgtgggtctccttgttctgcccagtgtgtcatggtgctgggcactggggtttttgtttgacagtctatggttttgtgggagcattgtcaccccaaagagtaatttcaattaaattgtgtgtgtgtggtgtgtgtgtgtatagtgtgtatttgtagacaaatgtattttatgcaatataaagtgaacataattcccatataagtgctactcctgactccaggcctgcagcaaaaatgcttttaggattctcacctagagatgatggcagagaggacagctacaccatattctatttgcatttatcttatacattataaaaggtttaagtaacttaccgtcttctgttgatgagaaattgtactgacttttatagagaagaatggacagaagctatccaggctgtagcagaccgactgcagaggcaagaagaggagaggatgaattgtagtccaacttcacaaattgataacctaggggaggaagagatggatgcgtctacaacccatcataaaagaaaggtagaaaatgatggtggcttattttacttctaaatacagtcttaatttgtctagaaaatgatgttgaaaactgcttctgagacagatgtcagaccattttcttattgtgggtatcgctttgtgaacctaaagtacctgttgcttaggacctgacgatgcagaagtgcttcagtattgaaggcctgtgggacttaggagtggtcattgatacgctttatagatcacattttatcttgttggtaacagcttgaagttaaatggtttccttaaggtgaaatgtctctgtgctttctgccccatgcctttaacctcatcaaagcatagtgagtcttagaaataacacgttttcttttaattactgttcatgagccattgaaggagaaaacccacacgtttcctttcctcggtgatccaaattagtatataattttataagaattgtaaataatatttttcattactataagcattttaaaaataacttcattatgtaaaaaaattatttaaacgagtccactgtgattatcagaaaattgtcacatgcagggaagaatggactggtgctgcccaagcatagcttgatggtcactatagtatattgaattgcatttgcatgtatatattaaatatatgtttgtcatttactttataaattatattcaggtgcaaaaaaacaagtgctggaagtattaccaataatgtttttcactcatttaattaattttgcagtgcatgtattttgaactatatggcatgcagctgtttctctactactaaactcttatcatttggcgttggtatagtaacagaatagcttttggtgttagatttcctgggttcaaatcctttcccttccgcatgcaatctgtgaacttactggaattaatttagataattaattcactatgtaaagttttttttctttaatattgtgtgatcctgtgaacattttctttttatttttaatttcccccattttgttttatatgcaaaatatggataatttgctttcaagattgtctgtgcaccaagtttgcgcagggagttgagaagacgggcatcagattccctagaactggagttacacatgttgtcagcatcatgtggggatgaaggcaaattctgtagtcgaagatcagccagtgtgctcagctactgtgccactgctgtgtgccccccccttttgtagacacaccctctcttttgtagttgttgatttgaatatgtaggttattgataagttgatttctcagtcaggaagatgaacataacctgtctttactcatttattcagatgagaaatttccttttgtatgaatatgtataacttgaagtttgattgtgctgataaatttgaatcaagttccaattaatctcatcctttgaattttagaccactgcatttaaaagcaagctataccagctctatcctgtttagttttctggaattctaaatatatgcttaacagttcagtaagatattgttaagccaggaattgaaatggtgagtttgtaacactgtaacctgatgtactacatccaatcaatggaaaaatattaaatataaatatagatattgatcggcaataaatggagatacattttgaaagatataactggaaatatatgagggcattttcttgagaagactaattataaatgataataactgaatcatacttttttcatttttataactactaagttgaatgtaattcatctttttcactaattaaccattaataagtatttgttttgtgcttatttgtagtacgttctgagcaggacttttgcatttatcttagccaattaaaagtcacttgtggtatatattaatatcccattttagagttgagtcatctgataattcaaattaaatattgtactcaaatatctaaatctttaaattatacgttgtataacctcactgtgtaacatttctttggatcatatatcagcagaatgttattgtagaatagaggtatagaatatgaagatccctgaatccaaataactgggtaaaactactaacgcatcctttagcttcctcatctgccagaatggaataactacctaattcatgtatttgtgagttataagataaggggatattttgcatttaaatatagtaagcatagggtcagtttcaataattgttgtagcatgaattctaattggtattaataataataataaaaattcccagagtcagatattggagttaatgctgaagatcagagaagcaaagcagtcagtcactagagagttctcacttctaccaatgctcagacccaaggggtgatcctgctcccagattgtatctccagaatgcatctgtctccaccaaaccaaagactgcactgagctcctgtcttctcccacctatattcctccccagtgctgggaataaggagagtgatcccaactcaactttgtatgagttctgtttctcttttagacagattcaatctcatggagccttgaactaaaggtccgtctgcctctgtctcctgagtgctgggattaaaggtgtttaccaccactgcttggcttctatagctaactagtgtggctgctgggattaaaggtgtgtgccaccgctgcctggcctctgtggctaacgagtgtggctaactttgctctggtcttcaggcaagctttatatgttagatcataaacaaaatatcaccacagattgtagttggtatcttactttgtcccataaaacttgatagaattttttttttaatatagaggatcaaacataggacctcatacatgttatgtaaatcctctactacttactgagctgtatttatggttactttttattcttttaaaattttagatagcttcttactaagttgtctagagtggccttgaacccatctgtattccagattggctttaacatataaaacccctgactcagcttcacaagtagctgggagtacaggtctttgctacaggctcagctggtagaaacacttttaatgtatttggggcttgaggtcttaaccatatattatttccattgtttttttttcatataattttagatgtatttggtagtttaaaatagttttaaatcacaggagtataaaaaaaaatgtttgtaccactggctgctctccaatgagtccaatgagttagtttaaggtggtccaatgttacagtcacacatatgacaactagatttagaactgtttcctgtatgtgcatcagaaaccatgaaaagaattgtgatttacatttttcttttaattttggacttcaacacattcagaataaagaagctttcatactagaaatattcagaggacacctaatgatcttgatagctgtgctgagagcggtgttgacttttgcctcttggccatgcagacatttgacttgttcccagagtagactattaccacagtatttgtccaaacacctcagactcttgaaaagagagacactacatggtagagacaagatttcaatattattctttttgaattaaaagatgtttcaaagggttgtgtatgatttgaatacatttgtaaggcttttgtttgtgtgtagacattgatttttgtaagttaaaaatggccagttttagaggatttatatttctgaagattatctatcccccatctagtgatgctttcctctatgtctctgtatatgtgtgtgtgtgtgtgtgtgtgtgtgtgtgtgtgtgtgtgtgtgtgcatgtatacatgctatgtagcccaggttagctttacacctattacagtactatggtctttgggattataggtttgtactgtcatgtctagccttgtaatttcttccttttttgttgttgttaatcatgaacatttttatcatttcttgtattcccccccaccaccaaagaaaacattttgtaatagcttgtatttcatgcacatattaggtagtttctgtgtatgccattctgaacatgtgcatttgctataaagacccttttaatttgctgtagttctggcaaaatagacacacaacctgtttctaatgatatcatatagaatattacttaactaatattagtgtctatgtaaattcctttttcaaaaggtggacaaagtgacagaagctgaaacccatttaaagactgttatattattctgtttgtttggcctcttgaccctaaaaattgcaacctttgaggaatgtaataatattttatgtatgttgcttttcatctgaaaatgccataaagcaatttacaaattattgtcgtatttttgtcttcaagacttggggataacaattagtcattgtatgtattaggtatcttttttagtgcttttagataaaaaataaatgccatgttgaacaatgaaatgaatttttggcctgattatgagactttttttaaacctgtttgttgccatggaatttccagaaacaataactgtgctatttcttacggttttgttgctagatgggctattctactgttcttgcatagatcttcaagtaagttacttttgactgtccatgttctgacttgtaaagtgcaaagaaaactttctgttatggcccagggtttggtgttgacttttgcctttgccttcatggcttctgcagtttgtctgtgcacgtggtatcttatcttgcagggtcttagtacatagtttttcctccagcaaaataacctcagacttcacacagaaggaaagccacctcttgagactttctaagacagaaaaaagcatgagatgctgtgtctgtctaaaggctgactttggaactggtatagactatttgatcaaagacaatttaagaagccacgattttgtaagaacaggattgtgcaaggagggactggaaagaggaaagtgaatggagaaatggtgtacttataagctcaaaagcaatactattaaaaataccaatcagatactgagagagtcagggagggaggaagagagaggaagtgggtagaggcgggaaagaggcagactgctgcttggtggaaacaagacagtcatttttaggggtctcatagtttggtcccttatcctccgggtttttaagctgttagtgaaattaactatgaatagttatgtattgtttttctaattgattatatttgtaactgtttccacatgtgtgcaactacaattgatatataattgaatcaataagtatatgttatttctcctgctctttttgacatttactttttcctttgaactagatattttaagacattgtgatttgacatttgaataaaattatcagaattataggcaaggggtgttaaaattgaatgtagccattaatttataaaatatttaaaatggttttaatgtcacagtgattctggcctcaaagggtgaattgaacaatattcgtccatttcagttttcaagaagagtgtatgtagaattgctactatttttttctttaaatgttatggactttcccttattgtaaaaattttagtacaaattcagttcttataaagggctgttcagcttatctgttactttgtcagtgagcttttgtagtttgcaatgtaggtaatttgttcatttcatttcaatggcagttttattggcatagagctatttattctctcaaggtccctttaatatctataggttttgtagtgatgtcacctttatcatttcatgttgataattttatctttgtgtctaccttcctgatcaatctggctggaggtttacagttttaattactcttttctcctgtttcttcaaaaaaatgtttctttgcttatattttaaaatgtttatgtgtgtgttattggataccactttttctgaggcagcacttacttaatttaacaaaacctgagaacatgaaaatacttcttaaaaaccttattttacttttaaaaaatcctttgtcagttaactaataatctgacccttggagaaattctaggttcaaaataatttctgaaaactacattaagtatgttcagtatcgaaggttgcttaagagacagccagtagtagtttgctttttttttttttttttcattctaagtggtctagaaagtagtagcatcaataatgagtttacagtgctgcattggaagcagattaacaataaattgtgccaacaatttcatcatgactttctaatttatatttttcagacaatgaatgattttgactatttgaaactactaggtaaaggcacttttgggaaggttattttagttcgagaaaaggcaagtggaaaatactatgctatgaagattctgaagaaagaagtcattattgcaaaggtaactgagtctaaaagccagtgactcatttttctgtagtatgaacatgtatgtatgtacattcttgtaagtgatgtagagacttcatgaagcaatcaaaatattgagtataacctgttactcgcaatagtacctattagacaacagtgttaattttaattttagcagtatatagtattagtaaattaacgaaactgttttattttgtggaggaaatactttcatttgttaacttggaggaacatattaactatatatttgtgatcaacatcactatttacattagtgttgctttcactatttttccattttttatatgtgccatatccatttcatgacccatcagttgaaggacatgtaggtagtttttatttcctagctattatgcatagagagcaatgaacatggttaagcagtatctattgagtgggctgttgagtcctttggacatatgctaagaagtgagattgtatgtatgtatgtatgtatgtatgtatgtatgtatgtatatcatatggtagatttaatttcaactttttgaggactctaccatagtgatttccaaagcacctagatcagctttgaatcctaacagtcaaggtgggttcctctttcctcacatttcctccagcatttgttgccagttgtcttgttgatcttttccaactgattggtaagatgaaatttcaaaattgttttgatttgtatttccctaattgctagggactaagaacatttttgagctattttttttagctaccccctacctttattttaagacctctttgtttggatcacagtcccccttttttttaaaaaaaaaatagatcattttttttatgatccttgtttttgatcactataatgaaaataacatagtgaaagaattaggaaccaattttggagtatatcttggaaggagaaaccaaaaattgagaaacagagaatattgagagactaattttaacatgatggatcattcaaaggaaatataatatctatgagattttaaagtaaaagcaataaagtacaaggtctaaaatttgctagaactgaagatgattttagactgaaagggtctactgcatgctggtacgtataagaattatgtctacatgttcaagatattctgaatgtcaaggcaatatgctttccagcttaagaagtgctgagggctatagtggcaggaccttgatgggaatcatagagggtatgccactctatccaagtagtatttgaaacagaagcatcagtaacaaacaccaagcatagtacttgagagtgatgatgcactgttcatagataacttttcttccctttcaagtaggcacaaaatatcctgggaagacaaattaaggaataatgagaaagcaaatagaggtggaagaaatacaagttcttacctagtccagtgctcaaactttaggatggggaggttagagccatgagtcagtgcttgataagtctgacctgaaataaaaagcaagcaggcgtgtaggaagagattgctaatccatggcttgtggagacaacagtggtccttggaagtcactgcgcattcaataaaacagtgtgccttctgcctttctgctcttgtgtccagtactcacatcttctcatttcatctcatttgctctggagggagggaggatgtaaatgctttcagacacaatatatcctgatgtcagctagctgtgacagagtcagtcataggagacctacagtgtacagaaataatgtgagtagaacattgagctgcttgaaggtaggaggcagagggagtagaaatgagcattgtgattggaggtagagatggattcatagtctatttcatctgtgcttgacaaattatgttctctgaacttcaatttactaatatagtcataatcataaacataggtttcatctttggatctttgtcagtgtagtaacatgttttcctgtttcattttaattaatgttcttcccttcttccttttctcactcattcaaacaaacaacacaactgtcataaaacagggatttagcaaatgaagggagaattttaggccacatggatactgataaaattggagagaatcattgcacctcatgctctctagaaacagtctccttccaaaacttctttctctgaaaaaaatgagacttgaagactcattatttactatttcaggatggttggatatatggaaatctgtatttcaaaggtattttatgagaacattattcttctaaattttagttctttatttgtaattatcaacaaattaatttttaagtaagcatcacattgttgtagccactaagtttgccactgttatttttaacttgttttgacatgttgctttttactgtaattaaaattattggcatctgtgtttacttcttagcttgtatgtaccacatcttcatagaaaaactaattagtacgtgaaatacagtaccattaaatttgcattcatgggaaattttataaccttaaatataaactgtgatagaaaatatattttaatgtatcaattggtctatcctgttacccctcaattgtgttcttataacaaagaattttcttaacgttatctctgtatatctttgctcggctctacacacgtggctatgtagattgaagaattgagaggaggaaaggtcttctcatgaaacttactaactgatctaggaaaatattgtatgtaatgtatccgttttcaccaaaatagaatgaaatatccacaaacatgttttcaaaagcaccacattattttttctgataacaaatttggtttgctattcatttttttagtctttctctattttattgataggttacttagcatactactccataacaagtaaatgttaccttctttgtaaatatctttctcactagccaggtggtggtggcggcgtactcctttaatcccagcactcgggaggcagaggcagacggatctctgtgagttcgagaccagcctggtgtacaagagctagttccaggacagcctccaaagccacagggaaaccctgtctcgaaaaaccaacatatacatatacatatacatatacatatacatatacatatacatatacatattcatattttttctcactgtgtataaagacacatttctttggatttacctttttggtggagacatgtaacttttaaaatatttctgttaagtttaattctaaaaattaaactatctcattagcctaaattatcttatttctaggagtactttaatggtttcctaattgctcctttctgttttactgtactcaccaatagagcaccagtaaacttttatttgtggaggggtgtttcaagacggtttctctgtgtagctctgtagaccaggctggtctcgaactcacagagatgtacctgcctctacctcctgagtgctgggattcggagcgtgcaccacttttcagcagcatcagtaaactttaaaaagtatgtatcacattatgctagccactattcccttcagttcccattggatcacattaccgagcttaggttctatttgtttttccttctgtagctcacttacaatattgtataaagcctctcttgttaatagtgtattacttttaaattggttatgttcactagtctgtgaaatgtgaataaaacagccttacctttttattataaagaaactttatacctgtattgttgttaacattggtaagttcactgcaaggaatttttaaataaattaatttatttctgtgtattacttgtttaattatttatttcatgaattcatatttttatatgatgcttattatccaatacctacttggctttgtccattaatactgatcactttttaactaattagaatgagatttccatgagaacagggatttcttctgttttgttcaaggccttatctccagtgtcgaagttatacttagataattctgcatagttgttgatgtaatggttgatttaacaagcttttggatttataacattcagttcaaacattaagtgcttgctgtatggtaacccttatatacttgatactaatgggtataaaaagctgtaagtttttgtgtcatttctgcttctgatttattttctcttaaaacattgctataattgatttaggcataatagtatagtatggcagtgtctttgaaattgtttgagtacttaagcctggctcctataaaataaataagactgaagtggtttatttatccttggcttaacttgctttaaatactacattgttaattcactttactttttgctcatacatagttggtattcccttgcccaaatgaccttagaatattagcttctttcataaatctgtttctcatttatcttctaggtataaactaaggtaaaatgcttttgtaagataataagtataattcagtgtcctggtgttctacttttcatttctttctttatgagctaatttttatttgccaacagtgttgtgatccagcaaggtatttaagaatttcctagcggcaaactgtagagatctagttaccttccttcttacttctttaagaagatagacctttgaaatgtgaaacatgtcttcagctttccatatgttaaaagaaaatcccttcttgtttgctttttacaagctaagaacatagttgggggaatactttcttttttgtttctttgtttttatgtagtttttaaatttttatttatttattttacataccaactgcttttccccacctctcaaatccactcttctctttctgttcagaaagagggaagcctccctttagtatcaacaaagcatggtatatcaaggtgcaccccttgtattaagactggacaagggagcctggtatgaggaataggtgccttggagccagccacagccttagggatagtccctgcttcctttgataggagtcccacagaggaccaagctacacaagtgttagatacatgtagaggacctaggtggcttccattcaggctccctggttgttggttcagagtgtgagttcctagaagccaggttagttatgtctcctacagtccttcctccctctcttcatcaggactccctgagctgagcctaatgtttggatgtgtgtctctgcatctgtttccatcagctgctggatgaaggttctctgatggcagttggggtagtcaccaatctgatcacagttcaggacatgcatccactattgctaggagtcttatctggggtcatccttgtagatatgagagcgtttctcttgcatttggtttcttcctaacctcagaatgctcccactttacagtcatcttttttagtacccccccccacacacacacacatacacacacactcaacttgatccctcaagttcccatccccacccgtcctcagtccacccaggagctctcttctaagggatacatgttctttttatgaaatatgcttacattttaaaatgaagtaggaggtttaaaacctgtaaagagaagcatattaaaaggaacaagcaaaaaagacatgcttttacacttttttactttagtttgaaatgtttagaattaaagtgtgtacttcatggttccttcttaaataactgagtgttagtaggagagtttattttatgacccttactaaattgtatcttaatgtctcccttaataaaatgtattataactatgggaatattagctaagttgtgctatagtattagctgctagtcatttgtcttaaggggaaaaccatttattttttcatcttgaatgattctattgttaattttatatcattattgatgtaacttgatcaaatatgagtgagttcatatggaatttatatcttctacccctcattattaaactattaatttgatttttgggtgtagtcgtggaggggaagctaaacaataaaggaagcataccagtgtatattaatgccatttttttttagtctaaacagtgtcctctgatttctgaaaactggtgaaagtattgtattttttagtacttacgacatgtatttatatatattttgtcttttctttgtaggatgaagtggcacacactcttactgagagcagagtactaaagaacaccagacatccattcttaacagtaagtgcttagagagctgctattatgacattttaaatttagtggaattttactaaagaatgaaactatgacagtgttttaagtaacatttatttgtctgtaccacattctttatggtaggctgtaagttcagtgtctttgaaactattgaaagttgtaaattaggtgtataacctgtatagtatgcatttttagttcctcccattgtccatgtacaactttttaaagttttctttcctcccaagcatcttcctgatttaaaagaaaaatccactctggcattttaagttcactaatagagcaatagactttttaggagcctgtttttatttttattttttaacagtagtgcagcctagggatgagggttcatgactgtaataccaatactgagaagcatgtaacaggaggctctctctgtgtttgaaaacaccttgggctacctagtgaactctagggattcctgggttacagtttcagacctatctcaaaagaaaaaaattaaatgaatattttactttttattttttgtttgctggcttcagataaatattaaaatgattacacagcatggtctttagttttcaaaggtcaaaattttaaatgaacaaatttcagagaaatacctttcatgatagacatgcagggatgtggaatgaatatgggatgagtcctgtgttttttcattagagaagtataaaatgtgacttaattcatgtagcatgttttcaaacaggctattttacatccagtcggggattctatgtaatagaggataatttataaaattactctatgttccatactgtaccaagcatattaagattaaaaagtaacagctgcagtttaaaattggaacgttttattaacattttaaggctatctaagttaaacattttcagagttatccatagatactttgctaaagtgtttcttgttttcatgtttattttccaatgtaatgacattttagtatcttacaaaattaccagggctgaccttactgagttgggccaggttttatccttagcatatacaaagtagaacctaaactacattgaagataataattaaaagcaattgaagataataattaaaagcaactgtgttcctgtggaaccttcactacatttccttgtagagactgcaaagatgagaactagagtgctgactactaactccgcctcaggtggcacattaggctgaaagcgctcatcaccattactcatttacttttacttacatatttcttagaaagcactcttacataatatactcttaaggaacaatgtcagtccatcagttatgctggctgtttttaagtgttctatttttgtaccattatactttaagagtacaagattataattaacatttattctttttcatttcaagtccttgaaatattccttccagacaaaagatcgcctgtgttttgtgatggaatatgttaatgggggagaggtgagtcaagaagtcaatcaagcatttgcatggaatagttcatcgagagcattacaagccctatgagttatggtgtttctaaacttgatgggtttgtccagttcttcctgttgagtaaacaaaagctagatagtttctagtgggctattttgatcattggaaagcataatcatatcctttattttactatattttgaaacctaaaatgttttactgaagtatgatgtttttaaatgggacataattccttttattgattttagatttattttattttatgtatgattattttgcctgcatgtgtgcctgtgcagcatgtgtgtgcttgatgcctacaaaggttagaagagggcatcatagcttctggaactggagttacagatggttttgagccagcatgtgggtgctgggtcttgaacctgggttgtttgcaaaaacaaattatcttaaccatttaaacagccccaacagtatgattttaaaattactttattagattgcggaatgatagatacatagtttattatgttttggatagtttttcaagtaagccttcagtgaaacttgcagaaagttttttaaacatattttgaactcaaccaaacaatattctatagacacattgcagctgagctttttcccttgtgtgtattgtagtaacgaagatgataatcaagagatttaatagatctcacagttcgggaacaaaattaaatcatttcacttgtagcttttctttattttccttcctgttttgaacaaaatcaacatgaaggaaaagtataataatgtacttaaatggtaactgggaatactttgttacagatggttcttcccaccagcctggtcccacgaccacatcagccccaaatgaacactcagagacttatattaattataatactgtttgttggctgatgaccagggccaacattgttatcggctagctctgtcttagttattaacccatttctatcaatctatgtattgccacgaggctgtggcttacctggtaatgccctgcatggtgttactcctacagcagcattgagactctgtctggtgggctcactctgcctatgtttcccagaatcatcctcatctcctagccccacctatcttcctgcctggccaatcagtgttttattcatcaaccaataagagaaacatatacagaataacatctcccatcaactttacattgtgaactttctcttttaataaatacattaaaagaagcttgtatcttatggacttaaatatgattatttcccaatcaaaattaatacctgctgtggaatatttttcataaagattatttgttatatagaaattacttaatttcaaattttcattcacttacttagtgaatatattttgtattgagaaagtactgaattttctgaatgtgtctaggacattgactttgctatgaaggagtatacagtttctttcttacaacatgtaggaatatgtagtttctagtgtgagtatattattagttagaatgtctaagccctaagtacaaataagtttataaaagataattcttcactaaagatcgactctgaaggagatttttattagtggactgactaagctaaagtgccccttcaggtagagatgatagtgtatccctggagggtgagcatagaacaaagaaaacttgagcagtaaaaaaatataaaaataaaagaaacaaagatgcaggcatggaaaacttggagcttcagtcagaggcccatggaaatatgagaagttcattgatttggagctgtgactggcatctcaaggatgtgggtaaaaagcattattgcaaagatccacacacagtttgtagtggtaatcatgggaaatggtgggatctactcaaggtatgaaaaacatgtagaatgacattctaaaagggatttttgaacagcttttactttttgaaataaaaggttttatcactttgaagacaatctatgttgaattagaagaataaaggagaacagatgtggaatctattcacctaatggttataattttacttatagaggtgcaaatgaaattactgaaatctctgtgttggtacctgtcagaatttaaactccacattttcttggaatcagtgtaattctcaattctcaacttgggaacatgaaacatctgtgtggagatgggcctctcggcatgtctgtgaaggttaagttggctgaggtggcaagacatactctctatgagtagcactgttctttgggctgggattctgaactatataaagaggcagaagcgaacaaatacaagcattcatcatttatcactttttgagtcagaactgtggttctagtgtaaccactgcctcaagctcctgtaactgccctaccatgatggattataaccttgaactgtgagccaaaagaaatcctttcaccctttggttgatttttgtcagggtattttaccccagcaacagtaaaagtaagacactcagcaattccatttccagtaattataattccaagaaataaagatatatgtccaaatggtatatgaataagcacatttattgtaaaagtgttatatattaatgaatgttcagtaagaatgctgctaaagtatgtaaagtgttgcaagactggagagtacaaagcatgctattattatgctgaaacatagatcatgtacatgtgctcatgccctgtgtaaatgtgaatatctcgttatccactgacatttagaactggtcttgtgactgagtacagggtagattagaagctaaattttcacttgggtgttcttctgtagtttttatattagagatactatgtacttaagtaaaaataagcaagtgggcagatgactagggaaagagtgtagagagatttgaaatggttatctatgggcaaaactcagagcagcattgagtgcagtgccggccacaaatccacatctgtatgattaatttttaaaatctaatcatgtgagaaatctcattgttgctaatatgctaaagccattcttagtaatttagctgcttttgtatttagatgagaaatagaaaaaattaccaggagaaattaaaatttctgaaaactaagatacttttgaatttggttgaagaagtctccacttagaccttttcacaaactatctttagctttatatgttttaaagcctatgaattggaattctgtggtttctcacaggctcaaatttcatgggagctggaaaattaaggcatggtaaatcatgtgggcctgttacacatctgataaattgttactattctgttccccactttctgaagtcactaatgaacctaccatttccattatttgctatccatgcctgttagcactttgcacagtctgtattgatgtctctgataaaattcatgttagtttttatatatgactttcagttgcgtgtcattcttgaaatcttctcttatttagatttctcattatttggctggcattttctcttctgtgaaccgaactcatctcattttaaattcacagaagacagaagtgccggcagtcagcatttgaattctacttactaatttgtggaggtgtgatttgggtgatttttaagtaaaaagtatttcagattcatggtgatgcttttaaaacttgaatttttactaaatttgtggttatataaataatcttcattaccaggaatctgagttattaatctttatgtaggttatgtcagaattctgttgcttttacccaaatcttttttaaaaaattcctaagccaagaatgctacattacaatattcacattaacatctaaagttcaaggcaaaatggtctttatcttgtgctgttttatgatacaattttatactatttcagggccagtttcctaaaatcattaaatcatcataggactacagtttaagtcaacaaatggcttggcaagttttgttaagatggtgagctgcctagaactatgagcagtgtctaggtagctctctcagttttcgtgatttctttacaggtgggctatggtacagaatgcactttcatagtaactggacttcttaccccagagtgacccttttaaggagttgcaaataggaaacactctgtctctgtctttgtctcccccccccttacacacacatacacacacaaacacacatacacacacaaattcacacactaccctacccctgaggaagaaaaacaggaaaataacaaaaataatacttaaatatttaaaactattatcctaaagcacagtatatatttttttgtattctgtatctttaacctaccagaatcatttaaaatgatgattgtagcatatgctagtagtttatttcaattttgggggttattacatttcactcatgtttctcggtgtttgtctagagtcataagacagacattagagttctttgcaatttggaattactaggttaagagctgtcatgaacattacaaacaaatctttatgagttttcattcgtttttagtcttgagtattttaaaactaatgagtttcattgtgacattttctttgtaatttttattgcatttttatttattttgtatgcatacacagcatgtatgtagatgtcagaggtacaacttttgtgagtatgttccatcttgtggatctcaaagagggaactcagtttgccatgattgactcctgttgactttacctactgagctgtctttccaactgttattatgacatttttgtctataaataggatagttgtattgtcttcatcctcaccatgcatcctcttgtacctccttcttcatgctggtccttctcttcagatcatctcctaggtttgtgtctttttaaatggtgagaacaaaatctccagttcttccttgttggctgaataatactacattgtttatgtatgtgacatttttattcatctgttgatgagcatctaggcttattttatattttagacactatgaatcattcagcagtatgcatgggtatgtaaattacctttatggtgtgttggcttagactccttttgctatatgccccacagtaggttaacagggtcacgtgatagttctgcttttagtttttgaaatgtactgatgtacattgatcctctcctttcccctacttcctatttgctttctttttgatggctctccttactggagtcaagaggaatctatgcagtttgtgtgtacatttcctgtttggctaaaaataaaaaaagtgcaacatgctgtcattcatttattagcagtatcttctcagttcatttgtccacttcctaactggattatttcctcttttgctatttaacattttgagttattcacaaattcagaatattaatgttatacaaatggttagcagtgatttttctcacagttctgtgggctctctgttcactttggtaattgtttccttgctgtgcataagttgttcaatttcaggtaactcagtttgtcaatgcttgttattacatttggagctattcaagttgtattcagttattgcctgtgtgtatatcttgctgttttctgctagtggttctagattttcaggactttcacttcataataaattgaattttttacatgtgagcaatagagatagtttccatctgcatttatatatatccattcttttctagtaatgtttggtaagaaatttgttgtttgtgtgcatgagtgttttgcttgcatttatgcatgtgtgctgcgggcatgcttggtgctgtgatgactagaggagggcatcagagtctttggaactggagttacaggtggttttgacctaccgtgtctgctgggaactgaacccgagagttacaggtggttatgatccactgtgtctgtgctgggaactgaacccaagtcctctgcaagaggattgagtatacctaagtgctgggaggccctctgttacatatggttatgatctactgtgtctgctaggaactgaacctgagtcctctgcaagagcattaagtgcaccttacatgctgggagaccctctgacccaccttgtatgttttgggcatttttgttgaaaatcaggtaacaacagttttatggtttcctttatgctttttctgtttcattccattggtctgtgtgtctttgtgtgcgtgcgtgcgtgcgtgcgtgcgtgcgtgcgtgcgtgcgtgcgtgtgtatgtgtgtgtgtgtatgtgtgtgtgtgtctgtgtctgtgtgtgtctctgtgtgtgtgtgtttgtgtgtgtgtgtgtgtgtctgtgtgtgtctgtgtgtctgagtctctgtgtctctgtgtgtctgtgtgtgtgtgtgtgtgtgtatgtgtgtgtctgtgtgtgtgtctgtgtgtgtgtgtctgtgtctgtgtgtgtctgtgtctgtgtgtgtctctgtgtgtgtatgtgtgtgtctgtgtgtgtctgtgtgtctgtgtgtgtgtgtctgtgtgtctgtgtgtgtctgtgtgtgtgtgtgtgtctgtgtgtctgtgtgtgtgtgtctgtgtgtgtgtgtgtctgtgtgtgtgttgtgtgtgtctgtgtgtgtgtgtgtgtgtgtgtgtctgtgtgtgtgtgtctgtgtgtgtgtgtgtgtctgtgtgtctgtgtgtgtgtgtctgtgtgtgtgtgtgtgtgtgtgtgtgtgtgtgtgtgtgtgtgtgttagagccttgctatctttgatactagggctctatgaaataatctaaaatctcacatcattatacttacagtattgctgggtttttttaggtttgctttctctatcctttgctttggctacaaagtcatttgtgtttccatgtagatattagaattctttttctaggtctgtgaacaacatctcttgtagattttaatattatttctttgtttggtagccatagtctttctaaaaatacttactttaccttttgagattataatataattacctcatttccatttcctccctccaagccttcttatatacacctccttgctcttttacagattcatgaactcttttttttaatgttattttgcacacccacatacacgcatgcatgcacacatgcacgcacgcacacatgctcctaaatatgtaagtacaacctgcttagtctgtatagagttacttgtatgtttgttttcagggctgactgggtactggcttatcaactggtgtgttcttccctggggatgatgatgtctcctgctctcagcactccttagttgcccacagttctttgtgtagggttgaagtctcctgggcttgtcccattcatctgagcatgtgtattgttgcaggacaactctaagggtgcgctagtggcttgcattcctcatagtaactaacagcactctaattggatttaagatcttcccaacaagaggcaaataatacctggcaccaaaaacctagccagatatccagggcaggtgaagtcatgaatcttggagaacttaacaacctggcattgtactgaaccagcataatttgtaactatattctaatacccacagatatacgtagtcctcacctgcattgagaaaatttctctttgcaagagatagaccattacaaaaacaaaaccagtcaaaaatgcaattttggagcccaatcccaatgaatacatccctaaaacaacttctctgcctaaggctctaagagcattgtaaaagggggacacaaagactataagagccagaggaccagggagtttgttgtgagaatataagcagctacacccatagaattgcaccaatatgacttcctaaataagagatgaacaaggccaagaacaatagctgtactccgttttttaaagatttatttatcacttacacagtgttctgtctacatgtatgcctgtaggccagaagagagcaccagatcttgttataggtacttgtgagctaccatgtggttgctggggattgaactcaggacctctggaagatcatgcagttttaaatacctcctgtgctttagtgcctacatcttcctgtggtttgggaatcttctgctccagcttcaatgaatggattttctgtgactttattttagagcttagcttcttaggttaattctttgtttaagctgtggtcatacttatttttcttcattttttaaaattagttacattaatgtcaggtgtcttcagccttgtctgtagtccctgatagtccatgttctgcttgatcctagcctacttgaaggtactttttactgtggtttttaaagtgtattctttgaaagtttcatacatgtgtaaatttgattatatcccctccccatccctcttctatgggaagcactgagcttcccatgcctgctccccacaaagtcacacctttaaaaaaatgaaataatgtattgaactcaactagtgctacctgggacaagaacaacctatcagtgcctcctttctaaagaaattttaagggttttatttttattaaaaatagatttttttcttgcaatatatttttattatgattttccatctcccaactcctcccagattcttccccaccacaccccactcctaaatccatgcctataggtgttttcttagtgagttgttgtcttctcttggttttgtagttcccattatactcatgtagaggggataatcctgacaacaatgggaaaacagtactttgacaagatcaggtattaacatacagtaaaaagattggaggcatcaactacatccccaagaaaaagaaaagaaaggtggtttatactaattgtatgaactggtaccttaaaaattcttaaagctagtgttggtaatcaacttccagataaggctttcctattgtactcataatctctatcattttcattagaaaagtcaatgcaaaaattaaaagcagttactcagtgtctaggatgtataactgacaaaggttagtgatacagatagacatggggtataaatgtaagcatactgcttcttattaccaaagtttgatatgaaatttctttgtgttgtacatataatccccaaggtggctcaggagccttcctctgaagcagtgccatagtggcccattgccatctgtcatctgcaatgtgagcacttcaaattcctccacacctcttaacatgtagcaagaactgtatcttaccttgtagatcctagtccagacactgtagggtaagactttagagacttatttattttattagtatgaatgttttagagagagactctctgtgtgtgtgtgtgtgtgtgcgcgcgcgcgcgcgcccatgcgtgtgtacatgtacctgtgcattatgcgtgcagtgtccatagaggccagaagaggtgttacagagaattgttaggcattatctgggtgctggaaacaaaaccctggtcgtttgtaagagcagtaagtgctgtgaactgctgaggcactttttccaggccctgaaaacttaaaagaattagtgaataggaagaaaagataagaaattttcgattaaaatatcatctaatattagagggggaaatgtgaatggaactggaggaatgcatattacattaaataagtgaggcctcccccactcccacccctagtttgtgtggaagctggcagtgtggatctcatggaattagagacgagaaatgctagttaaaatatgttaaagttctaggatagtaatagtagactagggataggagaggggaaaaagtaaagggttggtaattacataaaaaagcagataagagtaatagttccatgactaagtggagtgaagtgactacagttaactgatttattttatattccaaaataactataagaataggtttgagccaggcggtcgtggtgcacgcctttaatcccagcactcaggaggcagaggcaggcggatctctgtgagttcgagaccagcctggtctgcaagagccagttccaggacagcctccaaagctacagggaaaccctgtctcgaaaaccccgcctccccccaaaaaaggaataggtttgagtgtttcaaaagtaaagaaataacaaatggggctgggaagaaagctcagttgggaaagtggttgtctcacaagcacaagaacccaagtttgatttcctagaacccaaggagaaaaggctggacatggtagcatgcatctgtaatgtcagtgttgggaatgtggaaatagaggatccctgggaacccactagccagcctagctatcttggcaagttgtaggccagggacagaccctgtgtacggctcacagacatccaggttatcctttggcctctttgtgcatgtgcttctgtagctgcactcatgtgtctatctgccccaagtgttgttctgtagtcatttacttgttggcaaagttaccaattaagctaggctgaatagcctggggtcaacaaggattcttgtgtttctgcttccctaccatgctggggttacaatcacatgtcaccatgcctggctattttttttgaattctgaagattgcagcccaaacacttcatgaactgagccatctttcccaaccttttcttgatgtttttctcttcctctctttgggttcttggtttgtgcttccattagcattccctatcagtatcctgttttgctgcctgtctctgactttcagtgtagtaataccctgagattctgcctctagtttttctgagtttttgaattgtacttagtttcttggttttaacaatttccttggtgtccatattctaaaattggaatataatatcagttgcatatttaaatttcagtaggtcaaaataaagcccattgctcctgtgtccctatcaccaatttttttcctctatattgttttcagcaacatctactcagccagccacaagaaaacctcaacatcattgatctctcccttgatccaaattcctctggagttctgattctcctgaagggtgcttatggtctccttagccgatggccctcagaagcactcgtcaagatccaacataactgctggcgttcccaaacattcttattcttccaaagtcttttatatcatttgccatgtttcagcacattatcgtgtcctgtgggttagtgctgtttcctttaatgtctacaggtttctgtagcagttagcattaaataggtgatgagtaacttttgtgaaatttcaggaagtatttacctgagtataacctcaggtccttttattattcatatgttgttataacaatatttttaagattatggtcattggtgtgtaaaatctgttggacttcttgtctgtataatagaattccaactcataccatggtagataaagtcctaaataagctggcaatctctctccctcccccttcccaccactctcccctctctcgctcttgctctccgtctccctccccatattcatttttccaaatgtgtattcttgccacataaacacatgttctttgataatattttttattttattgggaacttgtggatttgtaaagggaaaataacaaggagatccaggaatggaaggaagagtgatgatgatagggaatagaaatgaccaaagcgtataagtatgataaatcacaatgaaaacaactgttctatacagtgaatatataccatcaaaaatgtgctgctttctataaatgagtattcttcttatatacaagtacacaggtggatacattttaagtagtaattaatcttttatatcccttatgttttcctttggggaaaaatttcatctttcagaacttaagtgaacttttgtctgtgacatatctccagatcatcctatataaattaatcactctgtctccaaattgttgttactatccacatcacaaaaatgtgttatagcctgctgtttttgtttttgtaaatatgcatgcatctctctcattgaggtagaattctctgatagtggagattatgtctttttttgtactttgttgaaatttgattgttatatagaaagcaacatgtagttaatgagtttggagatgggtatgtattctgagaccttagagtatgtattctgaggctttaccacaggttgagctgtatataagacagtatgtcttaagggttaatgtacccttcttttccttgtcctactgtttcacagagttaccttaaaataattgatggtcattaaataaatattagattgaaatgttgttttaacacatttcaggatgggctgtaagaatggcaatccagaaaggtagatcataaatctggaaagctgtgttacaccaaagccaagaaacacacgttgtgaatgagaacacaggcagtgtcctaacctccaaaacaagaaggggagccaactgtgcatagatcattggatctggcaatcacagatcactgcttgtccttacagagtgggttctgtaaagtagttaaagtagacatcatatggcagtgagttcttcctcttaattataaaacttgagctaactgatacttatatggaagttggctggcagacaaattgtagctataccatccaaataaagacctagaatcctgaatacattatattaatttagagagtctctatatctcctttgtcagtggccagccagtggtagagttggtatttttttaaaagaaatttagacacttagatgactactgcagcaataacgttaatgctagtggcattaacggtagacctaatatggcagatactaccttttcataattttttgatacatttaataccatctcaatttgtggtgtcccagatttgacaaagcatgagactaaagtagggaacctcatagttcagatctatctcccaaaatgtttgctactaatatatctaatgttcttttagtcatttgtagcaatatcaacacactttctctcttctcttccttgggtcagtgagtcacatacaaagtttcctaaagaagtactttgaatagagataggagtagaataagggaagaaagaatgcacatataagaagcctgtgtgctgtgtagccaggttggagggggcgtggctcctttaatcccagcacttgggagcctgaggcaggtctgtctctgtgagttccaggccagtctggtctacagagcaagttccaggacagctaaggctacacagagaacccctgtctcaaaattactagtatatgttgaagaagccttggtaagctacaattcttagcaatttattatgaacttgtgatctatatggaaacagttattttctgaccttagaaggcacattttttttattgagttttcttttttttttttagtcatagacatgtattgagtaccctctatgacatcttggtagtttattcaggtctgtaaatagtctttcattattggcagatttcttttttgtttcttccatttattatgtctttattttctacagaaattcttattatttataagctagatactgatgtagttactatcagccctatataatttgattttatgagcatgtgcatttcttataattcatattgtaatctcataattatattaaaatatatattatactaacaaatcaaacctgtagtacttaatgcttaatgtttatactttagcaatctaggcagatttcttaataataaagtataatagttcagtaaagacataatcaatttatggttcctcagatctactacttgatgtctgtttttgtaagaaattagatgtttttatttatgctgtacttagtgttgtttgtttagttttttgtggtactgagaatggagcacaggaccttgcaagtgttaggtaaatagtattcccctaactgtgtcccctgttgaaaaatgagataagatattaatcactgagtgatgggacttgcagtttcataaaactagaactgaatttatggttacagtaagtgcccagtaaatatttgttgactattggcatacctttgattaattaggaaataattgggcttatagttgtgtgatcataggagagcacagttaaaattgaaaataaatggattgtacatcacaaatcactccacatctggagtgatgatagcctcttagttcagtttgagcattgttaagatagattacaactttaagtcatcaaatttcttactatagaaaatgttatcttaaactttgcaaataattctagaaatattgcagataacatttgtagactatgactagctcacataagtgagtttataagaaaatccatatttttccttgaaatgaaatataacttaaataattaataaaaacaccatagccttgcttgtgttcatttattttgacaatgtcaatatttattccttgtaagagtggaacagcagtatagttagaaggaaatgcaatctaatgatgcatactttttcctctggtacctgaaggttaaatgggtagcaagcagaatgccttaaacaagattggtatattgattaaaacgctgatttaacagctcgcagtttccccttggaaacctgcaaaagataagccagctgctgtcttagagtgctcagtgtccactgagagtacactatctatcatcacaatatggtgatgagaggtgttttatgtttgtgttaatttcccccactaaatcagtaattattacaatcctgtccctgctgtttaccctgcagctgtttttccatttgtcgagagaacgggtgttctctgaggaccgcacacgtttctatggtgcagaaattgtctctgctttggactatctacattctggaaagattgtgtaccgtgatctcaaggtaaaaaaaaagtaatcaaaatttgtttttttgcagggactgtagggacaaacaaagtaattacaaagttacacaattttgagaaaagcactcttcttaggaatgttgtttgctgtagttgatacgaaatttcattcactgttatgtaagtggttcttttatgttttgtgttttggtatataaaaatcctattgactgaaaaactgatctaccaagagttattttgttttcctgtaaatgctataattacagaaatgataaatggacagtcaaagtcagataatttgcaaattcattattatgtttaaacatcataaaatatttataaataagcctcggtaacaaggttattggaaggaaaacattcattttcattgtgttaactttttgataggattatatttctcacatttttctataaagttcagtagtttgcttagttttttatatgtcaaaaccaagtattgttgtgttggtaataaaaacctggacatggctgagctcttttatgatgaggtccttgaaatgtcagaataggtaaacattctgtaaggcaaggtagtaaatattgtagtcttttcttcctgtcaagtctctattggaactattcagctctgccaccgaacagtaaaagcagccctagccattatgtaaatcaatgtttggctattttcccacaaatctttacttacaaaagcagtcagtggtttagatttgatctacactctgtagtttactgctccctggaggagctcatgtaaacaaatgataattctgatgatctagtcatgaataaggttgactatgctaaggaatctgatcctggcttattgtcagcaaattcttgactttagtatcttccttaaaatgtaaatcataaggctgggagtacacctcagtggaaggatacttgcctagtttaagtatgacactgagttccatctctgcagtcaggcacccagtgctgggcttgggttaaggaagctagaagctatgtctgtagtcccacctacttggaacactgaagtatgatcacaaataggagcattccttgggcaatttagtgagactttgcctcagaatactggcctgggtgatagctcagtgggtaaagtgtttactgtgcaaagcaagtcaacttgatttctgaactcagtacccacacaaaagccaagcatagacacatatgtctgtaactctagcactgggagggtgaagacaagtggaccctgaggattctctagccctccagcttagcttaaaagacatgcttcaggttcagtgagagaatttgtctcagaaattaagtggagaagtaattgaggaagaaagcccaacatcagtctcctgtctccacatgttctcacaggcgcagtaatggaaattaaccaagtgattgtatttagattgtatttttggaatttgaaatatgatagaatttatcactcttacagtaatttccccagtacacacacacatgtttgcagacatacactatagacacatactgtgcgtgggtgtggctgcatgtgctcctgtgtgtagcccagtgggtttgcctagcattggatgtgttcagaccccagtacttaggaaaaatggaaatcatgtggtaatgtttgcctattaaaatttggttgacaattgccttactgatcatataactagtttatttaaagtataattttattgtagaaatacaggttatatgagattttggggggaaatgaggtatatacctaagaaataatgaatatattattactactgtcttacttatataaaaccatttgggactctcttaatttttattcagttatgtaagcaggtctctagtttgtttcaagatgttcttatcactctcatttatgttatgagtaactttcttaagggctaactgtcttacaaaatatcatttcatagaataataataaaattagtatacattgttgtatagttgttgaaatttaaatgaagtattagaatactgtacttaaagaaaatgagctatacagctataaaacatctagttcagggatggttaaatatctgaataccataatgaatacagtcaactaaatggttatatttagtttatcttagaactagaaacatgataggattcagcacctttagatctatcctatgtgttgagtatagatgcctaaaaaccctagttacacagcatgctaacatatgtatcaattttctaaatatatttaaaaatatgtaacttcatgagtttaacatttctatcactacccctgctaatgaatcatatttatgggaaacaaggcagagaagcctagagttaaggaaatgagactagttttgaattactaggtacatccaaaacagttaacagtagtagaaagaattacttgttcaaagagatctgaagaagacagttcatttgagtgctaacatctatatggaatgcaaaaattaggagggccttagtcacagttgtctactgacatctctaattaaattaagtattagcataataaatgtcattaaatatgcattatgttcatatatcataggtgatgaaattggtattgttatttaccactgtatgccaatgatcttattgaataatttctaaattctttaacacattaattaaataggcattagtatgaatattagcaacacacattttaaaaaataattaagaatagggaatataggttttattcagcaaggcacctgacctttagcatgtacctttctttagctgttgtgagttagaggaggcagataaggagtgtgtttagaagcggcccagagaaagacaaccaaccacagcaaagaaaaaaaaagaagaagagacacttgatatttcttggttggagttaatacttagtacttagtgcttagtgctgtttatgcaaaacaggctttatttccaggttgtagtttggtggaaacacaccaaaaaaggatgtagccaaatgaaatagcttaatttttggaaaatagttttaatggtatagttagggctctctttagctttctgtaaataagctgaagaaacagttactcttcagaagtatattatgttttgaatgtattgaacatgaacattcagttcaaccaggtagtctgtggtggtgctacaatgaaaagacatttctgctttgaacataacttgctcacatttttggctatataaaacatgaacataatgcagaaatggtatctacatgtttgtattagtatataacctacctgtgttaatatgtagtattctctacatttcatattaacttcagagttctgaaaaatactttgaaatgttatcatagtaaattatctactccttaaataaaagttaagcatcctgcaccttgttaaggtgcttttcacactttgtatttcatctgtatgagactgtatgatcatatctcagtccacacggatctccatgtaatgatatcatagcttaggtttgagtgagagggtacactggtattctttattgtagtgacttttcaaaatttcttgttcttttggtgtcttataattttttgagatgtatgatttttgccaaaggttaaatctttacaattcactttagtgtatcagttaaagttaggttaagagacttcagctttataaagaatatgtttcactttgattgtctttttctttttatgtttaaaagagttgttttttttattagcaagaactacaaaaggaattatcacctcttacaaaaattaaactttcaaaagaatgtttctgtcaggtgaagtattaaaactgtctgtaggaagatgtgcagctttgggattgtgtaaataatactttaaagtaaaaaggaattggatgttgcttacaaagattgattctggctaggcttttatccatagaaccctcagtaatggttattaaggctaagctactttttccactgatgttgaagtcagtaattttagcacaacacatgtttgataaaagatccttcattttacatgtgaagttataggacttgcaaggactgacagatctattaaatataactgtgtccctttctggtactctactaaccattttctaaaactattctcttgttgaagcttatagaataaattatgctattttcacacacagttggagaatttgatgctggataaagatggccatataaaaattacagattttggactttgcaaagagggaatcacagatgcagccaccatgaagacattctgtggcacaccagagtatctggccccagaggtaggccttagtcccatttacaggaaaaataacagtaatgtttctcaggggaatttaatatttttccaagttgccgtacgctctacctttttttttaacaaaagaaaaaagaaaagcaaaatttcaatcagaataatttattttgcttttaactcatttaatagggtattttaaagccatagacttagaaatgaaatttatatggtttgcaagcatatatgtttttaataaaagttgatttaatcatgcttcttcttggctatacattttattaattggttattaacgtgaaataattgaataacttcactaaacatttaatagtttttttaagcaaccttggactttatgtagaagcagcgattatggtgattgtttgtgtttatgcttaactactggaaattgttttgttttggaaactgaaaaaattacttacttacattttggagctcacaagaaaggatgaataggtggcttgaaacccatgaggtattcactagtttattcaagtatctgttgtgtgtttgctctgtgttgaagacctttttgtttgatgtgccggtataggagcaagatagaaaaggactctgtactcttaaggaacttatgttggacataaactatatatctatatactaaaactatatataacataatacataaagttccatagagatgaaaaatgagaggaagaataagggaaaggtgtaatttggtgtagcaactatcttaggtgtaccagataggttatgtaacaacctactgaaatgttgagtgatgaagcagaatttcatgtgagcttggactctgttacatcacaaatgcagatggggctgcacaggtggcttctttctgctctgctcacacctgtgtccttctcgaaagacttaccagaaggtaactatttagagaataaaatgatctagaagcagcttcactcttctgtgtgacaactgctgctaggtgtctagtgacatgtcattaaggttgttgacaggagcacttatagcctctctgtggctcaggcttcttccaaatggccagggttctttggcctgaagagctagcagcaaatgacctaggaacagatgagaagcaatcttacactctcccaatcctttcctctttctcttctgtttttattatagtgaagtgttaaaaattcaatttttaaaaagtactttttattttttatgatttggctacagttcatatgccaatgtcaatagtttacttttaaagttgtgcaactatcacttctaattccaaaatgttttaataattccaactatgagctcaccttcgttggtttctcatcctttccttctaggctctccttgtagcttttcctgatcatttcatgtaaataaaatgatatggcatggagccttgtatatctggctctttcccttagcaaattgtcttaagtttcacctatattatatgcattttggcttttatgaaaaatgctgctgagatcattcatgtgtcatctcattcctggcctccttgtcataaggtccacatcacttttgtcattttattcctttaagtagtcataaacctacacagattcacacagcagatgcatagatcatacctcccatttcagaggagcatgtgagatgggaacaaagtctttcacaaatacatggctaccaaaagggatgtttcctcagagatgtgagtgctaagaagctggaaaccaacacagaggaagagttttgcccacggggcagtcaaaaggggcagaagctggaccaatgggacacccctcagagttcagtaaagccagtgtggctgatgttacagatggaggagatttcctttgatgactatgagtaggctctctgttattaatcactactctatgtctgttcctgtggcatttgggctaaggtgaaacatcatgaaactcacttttaattttagtcatcttgacacacacagctagggggtgatgtgggataaacaacagtgcagggctctttaaaagacaagagggtcatctattaaaaaatatattttgataatagtacttctccctatgtcccaggagtatcaggattctaattaggattgctagaccataaagcctaccttttcatctttaattatatgaacgatggcccaacaggaatcggtaatcagaggaaattagagagtagaataaattatgtatgtattagcatgttgccttacagtattagttttttaaactaagagttaaattaacatttcaaaaggcttagtaattataaataagtgctaatatttaaaatgtagtacatttccaagtattattgtcttgccaaacatgtaattttctgttacagagtctagagtttaaaattctgttcttgtgaaagaattaaataacatttacaaatgatgtttttatctattcaaacataagatcatattttctggactagttttgtttttgtgagatcatggaaacaaattctttgtttttctgacattcggttgcccttgctatacatttgtgatgaatgatgacatcccagatttagaataccaaaattagttatgtcacaattaggagaaattattctggagaagataaacacatctcgtttgagaagcagatgatggactaagaaacaaaaaacctgttttccctggagacattatcaatggaaagacaaaacctagaactgaatgtaaagagccttgtttctaagagttaccaatactcaataaactatgcttcctttttatttatttacttatttatttgtggtttttcgatacagggtttctctgtattgttttagagcctgtcttggaacttgctctgtagaccaggctggcctcgaactcacagagatctgcctgcctctgcctctgcctccctagtgctgtgattaaaggcgtgtgccaccagtgcctggcaaaactgtttgtttgtttgtttgtttgtttaaggcagtcatttctacatatttgacattttattgcattaagttattttatgtgtttgtgcatatacgcatgtgtgtgcatgggctgccatatacatgtggcagtcagtggacacccttaaggtactcattttctctttacaccctatgaaccctgggaatcaagctcaggttcaggttgtcaagtgttcagcaagcactcttacctcctgagccatctcctggtggccctgcttgtctttttaaagtattagtaaactttaaagcctttaaaaggcaatttgtttacccacctatgtagatacaaattgttttattaattgaaatctccacacatttatagaaataaaatgatcattacagttctttttttgcagatgacaaactttgaaacaactaagttttcaagtaatttaaattatatgttctaaatgtctatatatcttttactacatttttttaaaatcagaatatctaggaatgtatttaccctacctggggaaaaaagtgctttcttattttagttatcagtttgtgccattttattgaacaatgtccatttgtggagtaaagaaatactgaatacttacttgatgtcagacattatggcaggtgctaggtttgcagaaacactaggaaatgatcttcttaactattttgtagtttagtaaggtgatagagcatagataatataggctgccacgtagaaaaatagtgtctagagttacatactacagtggaggacaaaatcctagggaggggtgggacacggggaccctaacatagaataggaagggaggagggtggacaagtggctcgtggttggaatgtaaaggaactcactttgaatccttttggtaagggagttcctgtgaatttcaagccaggggtaatactgtgggatttacagggtcagctagagagattatctcatgctgaaactagcctttctctttactttcagatggtggctaccattgtttgaacctttcgtttctattctgcaccattatcaatgttgatcttgtctagagtgcattcttgactaccacaattttgcaagaatcatatcagttctttcttatttctgctctttgaccactgtctatacagactttggagatcatgcagcaaccttcatttctgccagggtgctcttttattattcagttacttctatctgattgcagtggtgtgatgtttaaaggtgaatggtgtatatattaaggattactcaaaaagctttatgagatgtcatctaaagccagtttattaagtgtcctatatgtcagacttacagcatatgtgtaaatgtttacatttacatgtactccacttattttttttattttttatttttttggtaaatatcacgagaaaaagtaagtcttctaggtaaaatgctattaattgaaaaataacacctaaataaatattttgtctcttcttttgatgaatagtgaagcttgaagtatgatatctttagttgaagtttacttgtaggaaaaataatatttttagaaggttacatagactaaattctgacagacctgttaactaggcatttcatgtgcattatctctgaaaatgcactgataagtacagctttaaatgatttcatttttcttgtagtccaagaaaataaaaccaatccatcaaaaaattatggaccataagatgtcttgagaggattctgtttttgtagtctgtgctgtgtttaaacacctataaattataaaagaatttagaaatcacatataaactcttttaaatttcattatttagtttggatcctattaaatccagatgattttatgcagtgctaattatttggagtctcagctttgctcttgagttagcagtacctgctcaactttccaactgtaaaacagtttgaaaatcaaatgtagcttacatgcaagacccaacaaaattaaaagtgttaagtgcaatttggcagttcacttttattgtgcccagtcctcaaatgtaccagcagataatcatctgaatgttagttatttttcacatgcttatgtgatcacacaaaaagtacatgctaaaaagaagcagatggtgacagatgggcaaggttgaggaaggtggtttggggaacccagagaaatgcacttctgtaatagtgtaaaaataaaactatttgataaccaacttagaaaaaacacagagattataaaatgacttgatttttgaaaaatgtctagctaggattgctgtaaaaaaaaactggaaataggaaattttattttctcttaagtgcaaaaggtcctccctctccactgactaaaaatgcaatcttcgtagttctcagagcccatctctaaagcattttcttactagaattctgaatatttttcttttgaaatctatgtctaatatctgatataaagtattgagaatatatgaaatacttctgaatagtgaaaacttttgatcaagaaatctgtttcattatgataaatcatagtacaaatgaaaattaactacatacaaattaaaaatcagaaatatacattagcagaagcattggaaagatgagtgtgaggtaatataggtgaagggagcagatagaaataatttgaataaaattttgatcaataaggattaaatgtgaggataacatccagtagacttatccactgtggtttccagggactcttcatgagacatgaatgtagtcagttacatgagcttgcatctttatctgtaggcaaacatagtaatgcacatagttatgttcacagtagcccttgaacaaggttctgctatgttcctgtaaattatgaaattggttttagacttctaagctttgtgaaaaagagttattttgctaacattgtgttgaacacttaaattttacttaattatgaataatttttccaacacctgtccctgtgagggactttgaaaaccttcctctttctggcagtctggaaaaatgtcatcactagtattactaggaagttaagtaaatttaaatcccatcagggccacagtaattagttctggttgttgtctgctttatggttagaattcatatttaaaaacccctatcagatgagttggcttgttacttgatttaatctgtttctttactatggtcctattatgtgtaacattaacagttatcccaatttgtcccataataggatattgttcaaatgtgaagtaaaatagaataaatgcccctcaacttttacagctagagctttactaatttagaagttatgagtctttatgctagctacatctcacataagctgctttttaatgtaatgaatcagaatgtttggtgggattttagttgaagcccaaagtttaattgttaactctatgaatcccaaggatatacaaaacagtaaccttaagttacttaaggaacactaatgatgtctatttttagttgagttaccatgacccaattttttagaattcattcatgtttaggaagttatatacatgtatgatttagttactgatatttatacatttggcttttgtcttaagggatttggtattttcgcattttgtctttggtttgcttttaaaattgttgttaattaccttcaggcatttgtgcaatgctaggaagtaacataaaactcaaagcaaatagtgtatgacatttatagatgctctatcttaagatttagagcagttggactttaattataaaataatgttatatgaaataatatgaaaaaatattgactcataattctcatgatattattcttgtgatactgcaatcttaaaatctgaataagaaaacttttgttatttctatcaagtaccaattttataaaatataaaatgatgtaaagatatataaataacctttatatgtaagtgatgaatatatagatatgtgtttctacataacatatatatcagttacctctatataacatatgtatcagttacctgaaatgtggggttaccagagaaaaaatttgaaaaagtggtaaattggttcatccaagttcacagtttactttcacaacataggtgtgtagacagtttgtttagatgtttgatttttctcccatctgttctgtcaggattattgattgagctgcaagtcactccagggcacacatcacctccttataattgctagccttgagtgcattgtttggcctgactagcaaactgagaaaggtgtctctttactctttcagtaaatcctgtttggtaaaatgatactggaattaaaatatttttgaaaaatgtctgttatgttaatattataagaatttacttgatagtaccattttgaaatacacagtttttaaatatcatcttttaaaattgtcacttattagcttatttgtgaattgtttttcatttacctaccccagtgttgtttttaataagtacaagtattttcatcagatgtcactagatgtttgatgttaactgataatctgctttgacctgcttgaatattggattttattattatgtctgagtgtaaatcaatttctaggttctggaaggaagctgaaacagcctgtttcttggagtttgtgctgtttggcttttgatttgacgtggtctttcctcacttaatgacatacttttcttttagtacattttcttttgtctctttgtggaaatgatgttgagtgggcaagctacatctaagattacaaaaggcattaggatggaggcagtactatatgactgcactcttgcagcatttgaagtatggggtaaaagtgtgttattttttcaggtaaggaacacttaggtcatttcataaggtcagtcttttactgacttcgtatcagaatatgttctgatatgcagttatagcctgatagatgatagctttaagttgaatgggtctgaagtatacttccctatggctgtacctttagagcactgtctttcataaaacccttatcagcttcacagtgaccatgaaatgttgatctggtttgctacagaaaagtcgtcatttgaagtgaccagagagatttttaacagcttaaaaagtgcaagttttccatactactagaatttcaaaaagaagtacttttgaataaagaaataaacctttgtttttccaaaaataatacaaacaacttatatttggaatactgtttagaaatttgagagtatttcacagaattatgctttaaaagcattccatttaagagagaaaatacatagtatgaagaatggaatatgttttacattatgtgtctgtgtggaatgtagcagtcatttgtatttttatttcttggatatttcacctccacaacttacttaaaatatttttgtagttgatagcaaagcctcaagagtgtgagtgagttgttagggtggcgttctcagcaatgctgaagtctgcatgtcagtaacacaatgcattaaatcagtattgttgaccacagagagatacagcagacaattccaattacatcatgtcagcgaaggtccacgtgtcagatacaaaaccacctattttgagcattagtgtttattttgtaaagctaaataaaatgtattttattttattggatagatttttcttacagtgcagttttggttttcagttgctattctcttctaaatgaaaccctctttttatgtactcctacccttctggctgaaaaccaggtatttaaacaaaaataaaggattgccagttttgccagctggggatgagaacccggctggtgaaatgtgggttcagaaggcagttaatccagcttttatgctttttatggttttatgaaaaaaagaagttaaaaaccacatttggctccttttcacgtatgccactgttttgttggtgttgtaggaatgcagttaaagattagttagatttttgttttgttttcttattggttaaaatcctatattagttagataaaggtaaaagtccagaaaacaatacactccactaatgaatgagctttgaaatagtcgctgttactatgtttcctttaagaaataaattgcttatgcttcttgaggcttttctttatattctgttttttctgatattactcagatatgtaaatgatgttttgtctattaaaaaactaaagtttgtctttcagaaaatatttcctgcagttaaaataactgatttttttaagttacaaatgattttcctggtatctttggcaataaaacaactatatgattgagttttttaaattctgccctttatctttaaatactcctgcttacgtgccttttttgttgtaggtaactttaatgcgactgctaggagttcctaaaattcaatacattatttaattaattcaaaataagatttttttttagttgatggaattcatattctagatcatgtttcctcaaaagggtcagataaaactgaagttaatattaatttcaatgtagttatctaaataaagtactggacattgtttctagataaggaatatttcattgagcaagaatcatatttgcagttgagggtatagcttagtggtagaacacttgcctaccatgcacaaggccttgggatctcaggttacagcatggggtcagcactcatagtaaagggccatgtttagttagattagaagagattgttctaatgtaaccaacgtgatagatacctttatgccataactagctaaattgttttttcatcttacatattttgagaaatatatataccttacgataaacctttccaccaaaagctgccgagccccaccgccatgtgtgcgctttacgccagccgcccacccgagttagggcccgaattaatatacagaaacttgtgttaggttcaaatgctgcttgaccaatgactaggattctcatctgttagctcagtcttaattatcataaatctatatattttataagacttgacttatagaggatgcctttcgctggcgccctctcttgccggtggaggaggctaaggggaaaaagatcaccacgtctctactacatttcccagaatcctctttgactgctagccctgtctaacttgctgtctcattggccaaacagaactttatttaacaatcaataagataaacatacacagtacattccccatcatatatacatatatataatatatatatatatatatatagggacatataacacaaagattccacagcttctgtctctcctctctgtctctccgtctactccctcctcttcttttcccccatctctgtcttgtctctctctcttggagacagggtttctctatgtagccctggctttcctggagaccaggatggccttggactcagagatccactgcctctgccacctgagtgctgtgccaccacacctggctaaagtttgtagtttctgggactttagatataaaatatatatttcaaaacaatcaatattgatactcatttattattttactgacatactctatactgatcattctttaaattgttttggtgtttttatctttcactgtttggtttgtattattgccttttttaaattggatttattttatgtgcatgaattttttgtctctctgtatgtgtgtgcatcatcatgggcaccaggtgcccaaagagctcagaggaggatgtctgatccctttaaactagagttacagatggctgcgagccgccatggggttctgggaaaggaacccaaatcttctaggtactcttagccactgagccagctttccagccctcttaaagaaaaatgtataatgcacaggatatgatctttcaccagcttggcctaattttaaattgttggagggactcagaatgtgaaatgcagtagacctaaaataaaataagccaacatactagctgatgcttttcatttgattatgtagatatggatgtacttcatattcatttaacaaaattttcatgacctttgctttttgtacattgaatgtttctgaatatatgttaactgtttcatataagtaattgaagaggtattcatttttatataaaattcacttcttttgaataatgctttaaccattaatgtacatgggctgggcatagcactccagaggcagacagattttgaggccaacttagtctacatagcaaggccagccaaggccatatagtgaaggtgtctcatactactactactaacaataataattaataattcattttgctggtttcacttctaggtattagaagataatgactatggccgagcagtagactggtggggcctgggtgttgtcatgtatgaaatgatgtgtgggaggttgcctttctacaaccaggatcatgagaaactctttgaactaatactaatggaagacattaaatttccccgaacactctcttcagatgcaaaatcattgctttcagggctcttgataaaggatcccaataaacggtaagctttgttaacaatccatacattgctgatgaacttcgttagagttcatgaattgaaagttaattgaaatataactgactctgggaagcattgcatttggtgtagacattttcccactgagatactgacttaattttaagtttataatctataacattttcaaacacatcaacttttgttttagaagcaatcttattttacatatcaatccccctcattccctcaccctcccattctcccatgccccccacagccccctccaacccttcccactccccaaggatagtaagaccttccatgggggatcagagggcttggttcggtccagtgctggttccccagttttacagctggggtctctgtgctctcactaggttaggtcaactgtttctgtgggtttctccaccacagtcttggctcctttgctcattcctcctccctttctacaactggattccaggagtatggttcagtgcttggccattgatcactgcttctgcttcaatcaggtactggatgaaggcaattaaggtagttatcaatctcattataggagtctcattataggagaagggcatttaaggtagtctctccactactgcttagattcttagttggagtcatctttgtggatctctgaacatttccctagtgccagatttctctttaaacctatactggctcactctattaaggtatcccttttgttgctctcctctattcctcacctgtctcagtcttcctgatccctcttgttctcctccccaactcctcttctctttttcctagaccccccccaccccaccccccggccgcgtgctcccaatttgctcaggggttcttgtctctttccctttctttgggggactacaaacacatcaactctttcctaacttgaaagttttatacaaactttccaaatacggattttgagaagttctttatgtatacaatgtcttagttaccctaaagcctgatcttataggcatgggggtagttcccttttctgctttcagtttctggggctttatatcttctgactcacatcatagggagaaaggcttgtttctactttctcttccctctaatctaagtaaacatttctattttttgttacttaattttttccaggtatggctaaaaaattgctgtaaaagtgagacactataattttgtttttacagatagctttggttatgaccaaaattcttctatagcctttattgctcagtttctgtattttgtctatttatgtattaattcacaatatactcactagtaaaatgtgaaatggtttatttataaaatgccccataatttgagagagtgcctgcatttctcccccttcctatcatatgtgtgtatgtgtgtgtgtgtgagagagacagagacagagacacagagtcagagacacagagacagaggcagagacagagacagacagacatacgcacacagagaagagtcttgttagggaaactgcagtgtggcctgttaagtcacacagtttaccctttagtatcttcatcattacttgcaagtgttattgtcataagtcattgggtcttgctcaaggcctctggcgtctgctacaccactgacaatggactctcactggagatcctcttggataccctgttgttgtcctgtgtcacagagatcctactgttttggatctatatgttcttcccttcacatgcttcaacagttcatagatttggtggatgttgtgatgtgccaactcatagccctggttcagggcctgggtggtagttggattggtctgcttgctagcttttccccgtctttaacaccgccaagctctccatcactgatggcctaggctaggttacccagtgcagcctatagcaagaagtgggtcctggtgtcctgctctcaggttctcaaatcaggctcactcacactcataccaccagggccaaccctactggccctggtggtatgagtgtgcccctcaccacaggtgtgcacctcactagggagtggcatgggtgagggaaagatgtcctctcccatcactgtgttttgtgaagactcttcaagggtcatattgagtgatcttagtgactgaggtgtttccttagacttgtaaaatagttttcttcctgttttccccctgggtactttcctatgatttatttagtttgctcttatgagaccttccagagtagatgtgtggacactgtaagtatttcatgtacagaaggtaagtaatttgttgtggtctcactgaaagaaagttcatgtggaacagaactagaaaaccaaatttcctgatgggtgcatagtgtttcttatgtatcttgtattcggtgcaccaattcctcagtataggtttacatttaaagtgtattgcatttaaagtgattatttcacagttaggtaatgagcagagcttgctgaaaggttgtttttaagcagagctatgcctactaattcatctttttagtgtgtgggggagaatctaataattgtcttggtttcaagggcagtgaattttgatatcattttttttctcactcttccagataactttggtcactctttgttctgtggttgtctctttaagtggctgtctgtaacaaagtcttatttgtgttattcatgccccattaatttatcttctattggttcattccaatcttacagatagtatataataggaacttaggaactttggaatttgtgttaggtaaatttcaagaatgttaggaccctaatgcatattttcttaggcttataagctcctttatataatgtgtcaagcctctgtactgctgcatcaaagtactgaggatgcaaagatgtatccatgaacatatctttctagacatctgcagactaacaaagggcacaaacctacattgcatatttttaggccaaactatgagctctggaaatcattagcccagcctaagagaatttgagaacctgagctggtctcagccagcatttgcatgtgaaatacagctagaattgcatgtgaacatggcatttgaaaagtccactgacgagactgcagagtatgagttgggcaccattgaaagatgaaacaggtgtttagattgtaaggatctcatgctttttagaaaataaactttatttggggaaggatgagaaaccagaagaatgctttaaagaaagagatggtataatgagacccctgtgataagagggcagccctggcagccagggagtggtctgatcagagtactgcagagcaggaaagcagaacactttacaaacctgtatggcagatgtatcacttaggatgcccaagaaagagggttagggtttgaggccagcctgagcaacacagggagatcatatcttaaagataaacagtggacagaaatttctagataagaaagtaggttcttttgaagcaaagattaaaaaacaaacagtaaatgcagttttgaataaatagaaatggtaaggaagttggtgtggggaattgtagaagtgctcagtcagggtggttaatttagggagtgcaaacaaaggcggaagctcgtggtggtgaatgctgagagaactttcgacacaccaagtctaaggttgctttgacaaacctacatgaaatgtcaagtgagcttctgggagaaatgcagtcaatgtttaagaatggccagctgtggatttggtgcccactgacattgggaagtaaataactggaggcaggagaagaaacctgggaaatagcagtttaactctaggaagcaaatagtgccagcaatagcctccagaaggctttgaacatagccagataatgagagttcttttttcatccaactacttttaagtgacgcctgaatttttctgacatcctttactgaatttctgcgagttctcccaaaggattaaccattgttgtcctttttttttctacatattttttttgctgattattgattatttgagaatttcacatcatgcaccccagtcacactcacttcccagtcctcccaagtctgcctgcacacccttgtgacctctctcccgtaggagacgatgcacccatcacttaggatgcagaggccagaggatttagagttagagtccagcctgaacaacataggaggaggaagaaagaagaggagaacactgcatatccaatttgtgttgcccacatgctcaatggagcatggccaaacccccattagtcagccccaagctcattctctgttattctgtgacccttctttctgcatgtgtttattctccagtgctactgacatgaaaatcatcccatcatgctgggttaatactgtaggaaaatgggaattctgtgatgttcctcacagtaaagaacacaggggagctcaaggtttatttggtattctgatgttgaagtctaatggtgttaggtataaataagttcaatgtgtattttgacatcattttgaagaatttgcattgtgtattaggaagtcattgacactaaaatttttgatagcttcacactttgaagaaacgaaaatgaaatctacaactgtaatctcaaggattgcatagcattcaagggcagtattttatatattttttacaaacattctagctatgtcctaagctaattattataaaagaacaaggctttatacaaaaatgaataattaaatccagattgatttttttttaacttgtagaacttctctacttcatgtaccttctcaagtacacataaaatgtaaagaatattgtaaactataaacaaactataaacttttaagaaaatagaattctgatttttatgcaaactggttagagttatacattgaaatattcttttcagaaataaatattttggtgtttttgcttttcttgtcccttaagccaagcttagaatgactttgttaactcagtactgatctctatgtctcagggagagacagtctaccaaaggagacagcctacctgggaaaccagtgactatagggatcagattctaaagctgaaatcaatacaaaatcaccagaccgaaggttccagataagacctctgctatattatacaatctaatgtccatctctggagtggagtttatttatgaaattctttgtagatcctagagcaggctctcttgcaattcacagcaaagctattcatgtacccattagctgtgtcaggtttgttttttggtttttgtttgtttgtttgtttgttttcaagacagggtttctctgtggctttggaggctgtcttggaactagctcttgtagaccaggctggtctcgaactcacaaagatctgcctgcctctgcctcccgagtgctgggattaaaggtgtgcgccaccactgcccggctaacttttattttatattctgaattgcgtagtaaattcaactgtaaggatatttcataggtaacaatattgtttctgtgcaattcttttgagatatgaaagcagtctgagcttttatttggaacagtgctctccagagatagctttgttgttgttctttttgatatatgatctctctctctgtgcccctgggtgttctggactcactatgtagactggctggccttgaacttactgtgtagaccaggctgacctaaaactgatatgtctgtttcagcctctcttgtattgggattaaccatgttaggatcacagatactcttctaaccagttgtttacttcaggatttacattaacaaaggaacattttgactcactcaaaagggagcaatggttatagcttcctttcttatacctggtgctgcccatctatttctaaatcttgtcaccccaccggggctgcattatctctacttgagagttggagtactggtcacttgttcatcaccccctctctcagaattgcttgccccttaaggcctcgctccaaagtttgtctctttcttggtctgagggtggttcttacatagtaatatgtttgggaaatttaggcattaaaattaatttttattttatttttaaggctacgtattttaaaattattaaaaacactgtaagttttatatacacataagttttattgtatgacttacgtacatattttgcattcatttaattttatttctatcctcgcagccttggtggagggccagatgatgcaaaagaaatcatgaggcatagtttcttttctggtgtaaactggcaagatgtatacgacaaaaaggtaaagtatttttgtagtactgtacacagcagaaatttatagggatagactttaatgacactgtctgttttactttgttgttcaaatgatgaccaaacttcttagcacaaattttatttaaattttgtgcctcttgaaactcctctaaagactttcaaagagtttgtcttttcttcagccttatttcttccagttgcaaaaaaataaataaataaataaataaagtaccagacattttgtatttttttcctttagataagccaaaaaaagaaataattttaaaaaattgcctttaaatctttaattcaaatcatttcatattcaaatatataaatccttatttttaaaaccatttgcagacagtttctgtatttaacaacgtaatgttttatggtcttatttgtattctctctgttacttgtaacataactttatttcccacagaagtgattgctaccaattaagtatctttatttttattgttatgtgcatatttcctgttggtttttgttcattatttgagatgagactgtgtgtcacacttggctcagactgtaatggagcttgctgtaaattgtgggcctgccttcagccacagtggttctctgggcgggccctcacaatgctgtgtccagatgcacagcacatgcccgcctctaccagttttagtactctactgtgccttcagatgctgttaatacagatactgattttgatttttaaatgcttccataattttctttgtatgtgtgtgtggtggtggggggtgaagtcagatgtgttctgcattttcttacactgagcctggagctcactgatgaggttggcctggttggccagtgagctccagggatgtgcttgtctctatccttcagctgtggggtatcactgcgtgctaccatgcctagctttttatgtgggtgctggaaatctgaactcaggttctcatgttggtgtgccagttactttacctaatgaatgagttatctctccagctcttgatagaaaattttactggcaaattttgatgtagttcagtaatttacttaatattttatctattttttgtctaatctagccatttcttgatttctttatttttatctgaaatatttgttttgtgccaaatactgtcctctttgagccccataaaaggatgacagtacaaataacatggggaatgactggtatttcatttttatgttatgttgttggcagtgggaaatttggtaattttcttcccttttctgtatttaagcatttaaaataatagtccatttaaacactttgctcagatcttcacttcagtcaaactcacatattttgagttcctcacatgtgaaagcacatgtatgagcactttgaaagcagtgaatatttgacttgatatagataacttcatccactttatatcatagatcatgatccttctgagatacatgtgtacctagcaaattgtgagctatcctctacactacaaaagaactagaaatattgcgtggtcagtgtaagtgcctgcacttacttatcgggccaaggtttcctgatacggccactaggaatgaaatcaggccaggttggaagagccacagcacaactgaggctctgataattttattgaaagcgatcacactttttgtacaaacagaatgtaatagcaattgccaggatcaatacagttgtagttgccagaatacagagtttctgtattctgtttgcaactcatacagagtacagaagattaatgtgtaggaccaattgtcctatcagcttccatgtttcctttactactaaaacagagaaaacacaaagcagcctgaacacttcattgccttagggcatgcatcagtgtctgaggaactggaaggcacattgcgcatcaggacccgtggactctaacctgaaaaacttaggatgcatgcctctcaaggcagctaggccaagccacctccatggttccctgcagtcagggactttctttggaatataaaacaataaactgcagcttaatgtcatccctttaatataccctgtccatgaagtatttttttccaaaaacaagagggcaggtgtgattcagtggcaggactcttgcatagcatgtataggggcctacattccatccctagtaccacacatgcaaaataagtaaagataattaaaactagaaagaaggaaagtaccatttttataagaggcagtgatccggatacattgtggctctcctaagctacagaaggggcttctcagccctgcaaggaaacttctgtgtgaagcatggctttccttagcagtattcagatgctcacattaaatggctgttggcaatactggagaaagcattagaacccaagctgtgtttctataaagaaacaccttgcctgtctactgggatacatatattcagagtaaagatgatcctacagtgaagatagccagatacccatcctgtgagaatagacattggacaagaacagaagctgccaaaatgtaactttatgaaattaatgtaaagaagtaagtgcagagcacattacaagaaatgcaagcacaaaaatgtcaagtttctatgaagagtaaatgtaccatgcattcataccttctctaggtgtagtatttgtcaggtaagcagctgttgtttttaggtaacctcatatatccagggacaaccttaccacagcacacgtcagtgttttgtctctgggttcatatagcagaaataagtaagaaaccaagtttcagatctcctggtaactgcaatgattttaacaaagttagtaagaagttgggtgttttgtaaatatgaatcatgaaataaactaaaattgaaaatttttatatctttaaaatgtgtaagttggtctagtggggtggctcagtggttaaaaggcacttgtctccaagcctgctgacctcagctcagtccccatgacacacatagtggaaaaagagaacctactcctgcaatttgtcttctgacctccacacatgagctgtgccacatgcaaaccctctacacacattcaaataaataaatatagtaaaaattaaaaatatgtaacatgtataattaggtatttcatctttaaggttgggtactttgttacttactagtaaattttgtgtgtttattatttcatttattagtccataattaatgcttaattttctaactaaaatttctttgagacagaatctcactgtatatctccgtgtaacttagaactgatgatggtaaccaatctggccttgaactcacaaagaactgcctttttctacccctttctaaatgtttgtgacagagtatagatgacatatttagcatcttaaagccagctctaagccattctcttcaaaaaaatgaaagtgaactgtagcatggtaaaggccttcagggaaacacaggggcaggttggaagggagagccagtcctctgttctgggaatgcctcttgcttccttttcagaaagggataagccacttgagtcatcgaaggttctgatcattttaggatcttttctggcagggtgtttgctggtatggtctacatactctttcctgctcttgactgggtcttcctgtgtagcctgtcttgccttcaaactcagcttcctccctcctcaggtacttggattataggtatgcactactaactagtccggcctcagattttattttattattttaattttaataagtatttaataagtattatgtgaattaatgttttgtttgcatgtataaatactttgcgtgtgggtttgtgtgtgtagtagtagtagtagtacagggtccatgggtgtgtagtttccatggaggtcataatgctaccaacagttgtgagctgccatgtatgttttggggcctggggaacaaactccaatcctctacaagaagagcaatttctcttgatcacagagccctctctctaacccccagcctcagattttaaaagaatcaaattaatttggattttattgacttttctcaattgtggtgtgtgtgtgtgtgtgtgtgtgtgtgtgtgagcgcttggaacccaaggtcctacatgtgctagggaagtgccctaccgttgtgttgcatcactaatcccatttgattattttgtcattctgttgtgtttgggtttactttgctagttgccataggttagaaccataattgttgtttttgaaacctttttttttttttttttttttttgttactgacatatgtacttagttaagcacaaagtttttctgtaggccaacagttttcaaactgtaggttgtaacccctttgggggttgaaaagtcctttcacgggttatctaagaccatcagaaaacacagatatttacattatgattcataacagcagttatgaagtagcaacaaaaataactttatggtttgaggtcaccgcagcaagcggagctgtgtgaaaggttggcagcataggaaggttgagaaccactgctctggagacttctgtgtctgtcttttggttttaaagtacattttcatttagaaaatattttatttatatataatgtagagagaagaaaaagaacaactaaatattaggggatgaggaaaaaccaaatggctattctaactatagaagttcatttgagcctggttaattttgttgtttgactttttagtgtgacattttttataacaaagtttaaaatataaaaaaaaaaactttaaattatcaggggtagagcagagagaagacaacagatctgcctgattttactctataacatgtttttaccaagatgcttccatgggtatgggacacatgttctgttaagatggcagatggtgcagttcatgtcgtcagcatcttctgtgtactggtactatcagttactgacaagcagttgttgaaatcttcagccacaattgtaaacatctttttaattttgcctttcttttttggttttgtttatttgttaattttttttcagtgatcctactcaaacccacatctttccatgtgcaaggccactttctgtgctttgagtttgcactgtcaacttgtatatacgtttaaatttaggatacttacatcttgatgaattaatccatgggattcgttattgttttttcttactgaatataagggtgtgtgtttgtgtatgtgatatgtcttttctcatcagtatacttctatctatttaaattataaataagtagattctgttttagcatgtagtttattcttgcattattcactgggtgacatatgagttaatgaaatataattcatttactgatacagttgtttggctgatttttagttggtcttttttgcctacctcttttgtgagttgttctgtgtttctggtttcatttagcctctgtctctcttgttttattgttgagggctgtgtagagaaagatcctgtctgccttcagctgtaactatgccacactctgcagcaggcttttcctcccctcacggtttctgtgatgctgctttctaagatttttttctttcatatgataaatatcacagtatatgataattatgaattttgctttattgataaatgttttgatatttgcagtgctgggattaaacccaggctgcatgcttgctaggtaagctctccaccatagggctacaccactaaactctgaacagtactgcttagaagtggttgacaatgctataaactcaccatttaatgtaagtccatgcatctacctggtgttttctgtgagtttttctttattgcatcctaaggctgactttagctctacacttcagtcattgacctttctggctttgataacattcatataaaggaaatactgaaaataattgaactgtgacatttaagaaagggcggaagaacagtttaaggaaagatagagcagtgataagtggcatgcctgactggagagacaaggagacgggatgcaaatggtgggcggtgcctgttaacatagaacacctgctttacagcattgctccttcgtgtggtataaagaaatagcgtgcagaccagggaccttttcaagatttcttggtgtagcaatagggagaagaggctagcaaaaaaaatcccattaaaagtctgtctcaatgattatcttagttggggttcatgaccatggcaactcttataaaggaaaacatttacttggggctggcttaccgtttcagaggtttagtcccttatcatcatggcaggaagcataggggcatgcaggcaggtgctagagaagagctgagagttctgtatcaggatccacaggcagtgagaggagaatgccacattgggcgtggcttgagcatctgagacctcaaagcctacctctagtgacacagttcctccaacaagatcacactttctaatattgtcactccttatgggctgatcattcaaggacatgagtctatggaggccattcatattcaaaccacgacaatgatgaatgttaactttcagcgtcctcggagaatagaatgaaggcatcaagaaaggaagagggagtatggattctatagataacttaaagaaataggatctggttttagtctaaaagtataaggagataggcaagacgaagagtatttgattcaagaaaaattctctaaggaaccaacatttgagtgagaacaggaaagagtgtgactctagggagtcagagtatagatggatttcctctataggacgaaaaggaaaataaagtgggtgagaaatgaaggttgaggtttgaaatgaacaagaatgcagatgagtggtactaaatattgggaaacatggatggtcaagaatggagattgtttttaggattgattattataacttctatcaaactctctggtgaaatgctgtacagatgctgtaatgggactttctgagtcaggcagggtattctagtatccagttataatttgtagttgaagagttgagtgactgaaagcagttatccagatgttattgactgtgattgttttcatgtaacaggaacaccaatggagaaatgagagctaaaaacggctttctaaggattgtcaagttggtgtttttcttatcacactcaaatggtggcttgttttttaacttggttcaaagaaagatgcattccaactatgtactagacattctcctggttcaacatcataattactgccttcttttcaccatgaggcattttatgtaggatataaaagaacacagacagctgccaaaactaacattggttatcccataaaatataaatagcataagctttaagaaatgcctgtggacaaaatatacatagattgttttttgtaagaatctcacctaagcctggtggtggtggcgcacgcctttagtcccagcactcgggaggcagatctgtgagtttgagaccagcctggtctacaagagctagttccaggacaggttccaaagccacagagaaaccctgtcttgggggaaaaaaaagaatctcacctaaaataaaatctgggggaaaatcacaatgaatagaccgtttaatggccaagtgtcagagcagtccaaactggacgcagtgttgtagcttggagtagatgtcagtacagaggtatcaaatgtgacaaatgacatgtttcaggtgtaaataccagtagtataatctttagtaaatacacatttgatatcattacagcatctttatgtgaagagccacttaaaatgatataaaaactggtagaagtacatttattcaacacaaatagacccatccaattagttttattgattattaaaaagtttcagcttttggttttattttctcaattgtctattttatacttcattgatttctgttctaatttttggttttcttctttctttggatttaacttgtatacgatacttggtatagctaaaatacccactttggtatttagtctaaggcatatgaatatttatggtaaataaatacagtatagaccttgagccctttgatatgttttacatagggttgatgtcagacatgtgaatgtcaattaatattatatggttacagaacaatgaaatacacttatttcaaatttctaggtttaggtcaagaatgcattggtattacagaactttgcgtctaacatagttaaatatatatgtcatagatggattaattttatgtatacattttccatatgtttgctttttccagtacatgtacacatacatacacaaagtgagtttgttttttaaaaagaaacagggataaaataaaccagaattcctacataagattagctactaaatcatattgtttttaagagataaaaatatagtaatggattactaaatctaggagtgctacacgttttttgttgcaaatgtctatgttccattattttgattcatatgcattagcacataataattgagattgccatgagttgtaagacagctatgatggtataatcatggtctgtcacaggaagagccaggtaatactctattccttaagcatcacagccttaaagtagaaaagagacaagcaaacaagcaaaaacctaaacgtataggtacatagtagtcataagtgatttgatgatgaaaaaaatctgaggaaactgacttgcaaagatcttctttttttaagtgcattgatattttgctttcatgtatgtctgtgtgaggatgtcagatcccttggaacaagagtcacagacaattgtgagcttccatgtgggttccgggaattgaaccctggtcctctggaagagcaaccaatgctcttaatcactaagccatctctccagccctgacttgcaaagatcttagtcctgcacttaggttgtattccagtccaagtggaaatatggactgtgatttactcaggaatttaggaaaattgtctttcaaatgtattcctctacttagcctaaagaaacataaatatttaatttgagaaagatagttaatgtcagtgtaagatttgctagaagagcaatgtggaaagaatttaaggagttgtaatttccttaacatttcctaaatatacttgagtttctacaagtaaacccagctctgaacatgcctttttaatcaactgaagttaatgtcttgaacatgttaactgtctgttataataacaaataatagagataatcagcacaaatagaggacaggcttatttgactcacagttttagaagtttccatatagcactgctgatcccatttctattggacttgtagtaggacagatggcgcatcatggtggaacaagctgctcactgatggcagcaatgaagggaaaatacaaggaagaaaccattgctctgtaggcacctttaagtgcacactcttctaagacaaagctaggctccatctcttaaaagttcatcacctttctgaaatcaaggactttatcacatggacttcggtggacattctagacccatactgtagtagcccataatcttgaccctattgtcttgatcatttagaactttctaaagacacattcactttcagaggaagatctatgtgaagtataatgcatttgttggtaaaatgtatcaagttcatactttaataatatggttgctgttttagtgagttagcatagaaaactatagttaggtgtttgtgattgactagtacttaccatttctaaagaggagtcacactgtgccaactgacacaggattattttgaaagaggtgcctatgggaaaaacaaagatggtatgatactatttgctcacagccaaaaaaaaaaaaaatcatgcagaagtagtgtactagggttaccataacaaaatgctacagactaggaggttggtgtttaaggaagaaataaaggagagaaagaaagtggtattgttgcaagtctaagaccaaggcttagtttctttggctcacatttggttatctttccctgggttttgatatggtctttccttagttcatgtatttccttgtgtatccaaattctctctttttgtagacacttatgagctagttaaagccactttaatgctgttacctccttggaagctgcacttaaattcagtcttttttttttttttgaggcagggtctctttgtgtaacccagaatggcctggaacttgctatgtagcccaggctagcctcagactcaacagttttcctacttctgtctcctgatgctggattataggtgtgtaccactaaatctggttcagatttttcttgttgtgtttgctttcattgtgcttgaagtcagacccctgttttccaagtttaaaaaacaaactgtctagagaataaacattttaatatagatttggtgacagtgagaatggggacaacacagttctctcaatccagttgtgtgtctctttcttaagattttatcagtacatgctattttattcaccctgtgtcccattttcctatttctgtaagaattacactctgttctgataagattaccagctctgggactgagcatcttgttttcaaagggaaacccatgtttctctcttgccctttggggtcagagctctgacaagtgagaaccatatcactgcactgctcactcacagccagtacagggtgacatggatcaggcgtccttcacaccctgttcctgctttgggacccacttaaactcagtctaggtctgtcattgctagcatagttacttcagactgccttcgggacacattgcttgtgaggagggagtgaaagccgtggatgtagttttccatgaactttagagattgctaagaattctgattctaaggcaaaggtagacatcaaagcctgttccaaaaaagaattctttacaaattataaaggtggactgtggtctgtgctttacagaatggctgtgttaagttggcttttgcttttgtttgtttgttgatttgttgggtttgaaacagggtctcactatgcaccctaactgggcttggatttgtgatcctcctgcctcagccttctgagagctgaggttgtaggagtgcactagcactcccagctaaggtttatttttatattagctgatgcacccgagtaccaggagagaaggaaaggatagcaagcaaggttgtggtcttgctgccctgggagaaccaccatcttgcctcttggacgacaccctcacaactgccccctacacctactctacaccaggaaataattacgacagactttacagtgttctctctcagtgttgttcatgacttcaccactgttctgtttcacataatcaatttttaatagataaccaagatcttattactctttagactattgacagataaaaccaagcaccttgtctaccttacactgtgactcggccttcagttcattgtttgctctctagtcatatactaaaagtaagttttcctgaattgaaatatattgacagtactcttttttcttatagcttgtacctccttttaagcctcaagtaacatctgagacagataccagatattttgatgaagaatttacagctcaaactattacaataacaccacctgaaaaatgtaagtaaatctattaggcagttgataactttctaagataattggaaacagccctcttcaaaatcatttgctgctttaaagattaaatccaactgtggcttttattccatttctgtcaagaatttggagcttcctgtgagggaatagaagagcagcaggagcaggcacagtgctgggtaggacagttagagaccaagttacagacctatgtcttccttactcactgctgtcttaacagggttttgctgcctactgggagcattccctagtccagatcttctttcttcacagcctatcatcagcattatgctagttttgcctcctccttacttacttgttcttaactttacttttaagattaggttttccttaaacagtagtgtctttaaacacaatttagtttgttatttttatgcaatactttaaattagaaatgtgttagggtgtgtgatcatacaccatttcatgtcattccgtagcattaatatatgccttgtactccaggaaatgctgtaagtaggttttgatgaagaacaaggatagggtagagttttgaggtgatgtttggaaagctaaaataatcacaagcatacatgtgtagcatcctttagcatttctttcttttcctttatttgcacatttttctctgctgttggttggtactgctcatatacactggatgtctgtgagacagaagaaggaaatgaaattctattcccatagtggtcatggttgactaattctattgttgaaacacaaaccaggactcatctggggtccatggccctgcactcaggagaatatatgccctgaggagaaatgtctgtgtgcatatgtgcacttctggttcctttgtgcctttagagtcaccaagaaatgcttaactcttgtaagtgaatacattgaaacccagtgtcacacacagctaggagcagggctcaccagctcagcctggacatcagccgagggcttaagatgcccacatgctaaagtgagccacatatgctattggtagacttttaggatcactaagaagttagagactattcagaagcccgtggagttgcagacaattagttaaaggttatctgagtagaaattatgagcacaagccttggtctttggctccaggatgagttatagcaatataattgttcgaaattctgggaagcaccagtgagtggctgaacagacaaagaggagtgccttccctgagttcttgctgggctctactgtttggatctaaggctggttgttcgcagaccatcattccctagggtaaaactcttgctgacttccctttttggtatatatccacattctcacccagagaaccacctttgatgtcctagttcaaggactcttaacaagctccattctgctgtaatgcttctgtgttgatgatgcctttatttgctatttttctgttaatttgttatctatttttgtcagtgtgacataatattactgagagaaaggttctcgtgacttaataactgtttgtcacagataccaggatagatgcctagcccaggatagatacttgataagtattcattaaacaagggaatataaaatgtgactggggccttggaacagtttgtgtccctgctcttagtacagttcagttgtctgtggctatctgggcttcctttactcccagttggcatccatagtctacattgggataggaagatcttggtgtctttttggaaagtagattgggggggggaatcttacaagcctagcctggtcttgaactttataccttgacctcctgaatccagaaataacattcctgggccttacctccaagctggactcacaacatgtctctgtcttcagtatcagccttttcatgatgctgcttttcttaaagagaagttttggcatttgaggattcttttttggacagctgaatatgaatatatgattttggaaaaaaatagaaataggtaggacttggaaatgaatgatagttcacttcaaaaagttaaaactaaaagccctatttacaatatagaaaatgtgaaaacatagactccaaactggggagcctgcctcatgtcttgtctctgctacttactagttctgagatgtgatgcctcaactatctgcttgacaaggaagcctagggattcttgggataatctctagagcccttgttcctctggtgtgtgcctgacaagccagctcttaaagaaagtctccaggtgactccaagcttgagtggcctgattaactggcctttaggatctacatgaaaagtaagagatgagcctcatatagtaaatccctaactaagtggaatgagcatgaagaaatgtaagactaaaaagacagcaaaaacaatttgaaattttacggagtctcaaccacgtgaaattagaagctattaaaagatgctcttgtggttagtcagtcactgttccatgactaacttgcctcaggagtcatggaccaggacaccttaactcctcctgtcttcatatttggaactctgaacttatggcaactatcctgatgagaatttgtatgttcatttctcagtttctaagacctgcaataacactgaactactgtagagaagaggttttctatgctctgcttctagaatctaaccctaccctatttcctcacctccattaatccacaagagaaggccatgttgcataggcctcagtgtctttgaagggtgctgagtttctttctagagggatagagctgcacagaaagcccttagactagcataattttcaaggtgggtgtaattagcctgtggggatctgcatcagaagcagagtatggcgttgttctgctgctggtcctagttacagtacagcagcaagagcccagtcatgtggaccaagtctgacaggatcaggaagagcacacaacttggcctcgactcattcagggtctctaggatgggaaggtgagtgagaggatggccaagcctctctctgtcctagcttcctgttagaggggaggggttccagtggctattaactgaagtttttggttgtaaggacccaggcaagagcttcaattttggcagtccataagtcctaggcttctgttgtgaaaagataaaagaggcaataaaccattattatacagagtagtttttctttttttctggtagccttgttacagctcacacaccaagatttggttcagaagtccatagaaatgccatttgttgacagttgtcttcccatttgccaccttggttttgtaaatcaaaaattttaaattatttttgagaatatatcagtagttaagaaagaaagcaaaatgttccatttcctacaaacagctgcatcaatatgccagattgtcctaactggtgttaattaattgaacagattttagaatgtgttgtctttcattacatccatcaatggtcctatgctttcctctcacagaaagggaaaatttctttgagagagatctggtcacttttactactgtctaattacatttgctaaatgttctgagaaaaacaggagcctgaggctgcttggatgcagagattcagatgcttaactgtagagttgattatttcagtgtagcgcatgttcattgtggttgtcattgtacctgcaaggtcctccagttccctccactgcagcctcctgccagggcagcacaagtgcccatggggttgctgctctcctatctcagttggacaaggtcagagccagcctcattgttaccaatcctggtggatcagacaagagctggagtgggtagctttaaagaataatacaagtgttggggcctcacagccagactgtagattcagatctattcctgttcagaattgtggtatgtaatatgaagtgacattggaggctgtcttaattctctggggatacccagcagtattccctccctaccacctgccatgtaaagtccttctggacttaggacaaggtctggttacagccaggagtcagagcagcctctgtcatctagagtagaagagcgcaaagccttctccatacagtgtctggatctcgctgcaggtttgctgtgcagaaacactcagaaaaataaatcttttggtggggagaactgtttctcagatgtgattggcacatgtcagagttggaacattatgacttcagctgactttcctgtagagatttcatactgtgtgactcaacaatggatacgtccaaaccctgccactcctccccgctttcagacagctcaacagtttgatctagaagatgcatggggttggcttagttctgaacccatattttgtaagtaggcagagatttctctgtacctcagcactacctagaattgctgcccagctgctggcaaggtagtggtctgtttgcagaggggaatttgtgtagagtctgacacaaagtgtatgtgctgtgtttctatctactactataagctgaaaaatttaggttaatggcaattcagtttcacttctgatgtacctgtgcattaagaggagaatataaggggggagaaacaaagcaaagaaacagaaccattgattttttttttttagatgaaagcagagccttttatggggtacagtatagcgtctgttctttgttattacacggaaatcaatgctccctagggaggctgggaaacaagaatagaaagatctctctataatggatttgaggatatggaaatattttgctggtgggagatgatatcccactaattaaaagcacttgctgctcttacaggggatctgggttcagtttctcatcccacgttggggctcacaacctctaactccagtgctttaatttgtttatattgctatggtgaaaaccaggacccaaaccaacttttttggcttgcatgtcctgatcacagttcatcatcaaagaaagtcaggacaggagggtaaggcaagaatctgaaggcaggagctgatgctgaggccatggagatgcagcttcctggatagcccctcataacttactcaacttgcctttttatataacccaggactaccagtccagggtgacaacacccagcatgggctggacattcctatgtaaatctgatggaagcattttctcaatgaagggtttcttccttccaaatgacttcagctttatcaaactaacaagaaactaaccagcatacagcaacatacagggggattgttgcttctcgactcctaggatacttgcacacatgtgtttcacataagctcgcatctctctctctctctctctctctctctctctctctctctctctctcacacacacacacacacacacacacacacacacactaaaaaataaaaacaagtcattatttaaaaggttgtacctacgtgttcaacttgattacaggacactatgcactgaactttggggatgagcaggagtggcttagatggagccctctaatgctctgcacacctgaggaagagctctgtgactgtgggttcttaccacacaacacttagggaggaggaggcatggtcctttctggccctttacatacaggaaaatagagataaagagaggggcaagttcatacgtggtccccatgtcttgcaagtccctcatccctgattaatcaggacttgaatgttgtcctttgttttccatcttttatctcattctctttattctaaagttttatcacagagaaatagagagtagtgagttaattgatggtagatattgactaatgctacttaaagaagatgcgtttacactcttaccaggtcaccaggaagaaaatgtacaagcattttgaagacctagattctgtagaattctatgacctaaaatttagaacttcatatattcctaaaaagcatgattcttgaaagtagaattctggtttttttagtaacattttcctttgtattgaatcttgaaattctgatgttttaaaggtgatttataatgttatttctttgtagttcatgtgcatttagaaatcatagttttagaaaaataactccattttattgaaaagtgtatggcttactgtagtgtggtgtgctgtgcaggcctagtaatgccttccgtaactgacagaggctgttgccgcccacagatgacgaagacggcatggagtgcatggacaacgagcggcggccacacttccctcagttctcctactctgcgagtggacgggagtagtctctgcctctctgtggctccacttcatcttacattttgtcactgagaatgatccctggacatccccaccagtcctcgctctcacagacagcaggggcacttctgacaccctgagcagccaagggtcttcaccctcaccacctttcacccacatgaaaacatagacacagacactccaggttttgtttttgcatgaaattgtatctcagtctaaggtctcatgctgttgctgctactgtcttactatcatagcaattttcagaagtaactttacaatctttgggagtcatgagcccgttgttcatttgtgcatcaattgtcatcttctttcagttctgtttttccctagcagtgaaggctaaatgagatacacagattctaggtacatttttaactttatagaagctacatcaagaactaattagactaagaagacttagtttatacttctgaacaagcaattgatgaagggtggtggtgtgtgtatgtaagagtttagcatgtatgtctgatcagtgcataaattatgcaccgctgatatttggctgaaaatccttaggaagctttgagaggactgaagggctgatgagatacacatgtttttaattcctgctggatattgtggaggaagcccagtgtcaccatggatgcccagacttcatgggcaaatggatggtgttcaccaagcactgcaggtgcagactcacctagagggtcttaggatctacgttgtaccagagagtatttttcccctgggcttggcaaccttttttcccttcttgatatttatcacctctgatggctgaagaatgtagacagtataatgatcctgctgtcgccaaaatctatacaccaaggtgaacaggtgtttgccttatcagttttaaagttttactttcagttataggtgaattagctttttctcagatgttaaaactttgaatgtccttttaatgattttgtttatattacagtagtatttattttttagtggtaagacttgtattgtcatgttagcaaacgcagctccaactcacaggacattgactgcggtttcttttgaaccatgtgcaaggaatgtacacacccattagaatcatgcactttttctcctttgtacaaaaaaattggtaaggctctggaatcttatctgttggttagaatctggctatgggagaagagatgctgtaatttaaccctttggtgccgaaatgagaaaatctccaactacccaatgccaaggggttggtggaacaaatggatgttaatggttgctcacttgagtggatgtgtgagtatggcctggcataaggtaatggagaaagctgagacccaaatgatgataagaaatgaactttacttggcaaaatatttacacagtaggtagcaatggataagaagctggtgtgtttattcttatcaaggtacattcattactgaatcaagccatcagggaaaacaacaaaacaaaacacctctagcttttctttttctgtacatactcatgtctcccaatcccaaacatttctcactgagaggggacatgtatgcaaacctcatctttctccttcattaatgatgatcttcagattaaaccctttggtgctaggagctgacattttccaaagcagactatgaagtgcaaggatcaaagcctttcttgcaacaagcaggagggcatctgctccaaggagtggtcatggagatgtattctagttcttgacagctcccaaatggaagactacagcgtgacatagtagtgttactgcattgtctttttgagtaggaagtcatgttctcattcagatgtcttagcctctaggctcagacttggggaagcagagccgctgctggcagtggctagccactgggactgctggggtgaaaagggcatttactaaggcagctaagatggattcagacatagattttgtcctaatttttcatgtttctacctgagtgagtttatccttagtatggagtaggaagttaaacagatgttcactcttgcatctgtagtcttttttcctacttagaattatgttgaatgtttcacattgacaggaaagtagattagatggtatgtcctttaagttatcttgcgtccattctgtaagaaagaagtgtgagagagaaagaaaagcaagctgagcctgggtgatgctcggagcatttatccctcagagcgagcagacactgcacactaagcacacggcttcttttgttctgtctctcctcccaagtcttaaggtgacttcatgaccttggccaagggtactttctaaagattaatgaggggacactgacaacgcctcaggctggctactcctcacacctggcctttggtccccagccattcgagggctttctcttcccatcccaggctccctgagtgtcacagcaggcgtgttcttgactttgattttgagaattttttccttgcaacctcagatgtccgttaaatggcaaaagtagaacagaagagagaggtgtgtgaaggagattcctatacctaaggttaggattcaggcaattgaaatggcttgaaacctggaatcattatgtctggatgcagttctggctttgtgattccacctcctaccaactccagcttgacctcttgtcatcatgcagggctgtcttggaggaaaccggccacctctgctcagattgctggcagggttgctcacagctttgctttctacactaatgacatagcattatcccagtattgtttccatttcccacgcctgactgttctcacaggggccacctgcttctccttccctcactaactgcagggtctctaccacacctcagtgtccacactttgctgctactgtctgtactgtctacatcccagtccccttagcttgctcctggtagtgcattacaggcaagcatgaaatgtaaagtatttatttaaataaaaagaaaacatctgaattggtcattgagtcacctccctgtagatttgtagtttgtgacatatttttactttctagttcttctgctagatccatacaagatgtggtcatctgattaagggtttggagcagacaaagctatgaacctagatgctatatcattgtcactgctggtcacactacagacgttcgttttcttacatatatgacccatagggtatgaaatgactacaaaaaaatggctttgtacattgtacacccttagtatctcacaggcatctggtagggacatacattacttccttcgtacagacagcttaaataaagccctatgtcaatctgctacttctctctttgttgttgttggatatggctctgtaatttcagaaaactaaatttttttctttatggaaagaaaatatttatagccccagctggtattaaccaaccctgtatgaaggtgtggcaggaaaataggtaaattcctcttagagtaaaaccacatatggggttatttttatgtaagcaaaattccaatagcatgcttgtacaaactgatgaagtgctaggagtggggtcactgaccacagcactagttttcgaggcacatctactgggatgccagaggcaagagtatgttgcagactgatcctaatggtcttaataagaaatggtgtggagccagacttctcaaggaatgtagcttatcactaatgtcttcctgataacatactgctcgacacacttcttttcaagtgtatttttaaactctcgtggcagtttataacttacacatgagtaatcgatggtcagaatgtctgaattacattgaataattttggatggggcgtgtttccaattttacctcataagttagaattgtagaacttggctttgttcttgtgatttcaacagagagaggcatgacttttgggaccagtttgtcagacatgcatgtgtatttctcacagccaaatttggggacatttttacatgtgctgtcctcagaatcaactggggttgacagattcaggaggctgaaataaagtgacctctataactctttaaaggtgctatttttagaatattgtataatttattcatggtatacataaaatagaagtgaggacagttaaaatatgtgacagctttatgtctagcatatttgatgaaaccagaaacttctgactcagaatagaagttgtgtttgaggcttgcacctttgacatgccccagagatgaggatagcccatgcactgtcatgccaccacatccacggcctaagctgcatgagtgtgaggggcgggctgagcatgtaggaaccaggcctctgctgagagccctgggctgctgggttgctggctgggaaaggagaagaggttggacttgtcccacccacatgcagccttgcttgccccagtgtttcatcctaccctcaaacaccatgaccatctcagcatccaggttctttgttttgttttgtttttgtggtactggggaaggaacccagggcctcataagttgggcaaatgttctaccactgagctacaccccaaaccttccagtgtccatttgtattcctttaaagcatttgagggcttgactgtatagtagaaatactattttagactaaaaatatgatctgtgtacagatatttgatatactgttaagtaaattttctaatttcacataaatttgtttttaggctcctctcaaaaactgctattgaagactaaaatctgacaccatcgagccaaagatgccttttttgggggggggctgttttgtgttgttcagagaatgggaaagaataatgcagagtgcttcctgagtgcagacagttggatggtaaatactggatgctggctaaaggtgcacaggtagagggcgtgacagtcaatggcggcaggagaggtggtcttcagtacactttggctgacttaaaacgtgcctttggtgtgttgtttgtcactgctacaaaatgcaaaggaaacggaacaattcaagtcttgagaggtcatttttattaatcccgtgtatactctagagtagagacaacataaatcagtgacttgaagctgttttgagcacactccaactagcccaagccagttcatgctgaagcactccctgtctgtagcacaggggcagaaccatggcatgaggaccagcccccctgcagtcccaggtggtgtctccctggggaggttttggtgcactgtggcacattaagtacaaatcagatgaatgtaaatatctctttgtaaatcatttatttcactctgtttcatccaggtcagcaatcagattgtggcatgctgggtaactggaaaaaaaatgataataaaaagtaagtttaaatagatcatgggtattgttttctcatttgctagtttgatcagctgttattactgaaggtttgaagaaaaggtttctgttgctaaaaatgtggaaatgtatgtagccaattgtattgaaagtttgtgcctcactccttgccaccagagaccaaagaaagtctgttttgtgttgtatcaggttatgtacctccaatgctttccttctgaaagcagcctttactctagacctatatataactctacctaaggacaactgacattctgactgtgggcctaactatttgttagaaagcagatctgaaattatattgggctttaaagtaggggggaaactaggatgtcagccaaagtctggatgaagtaacacaaaagagcctctgttacttgcagcttcgtgtaacatatatagatgcatttttacatattgacactccgaatgtggaaggtgggacccatgatactgaggtctcatttgcacttattggtatggggataaccaagggttgggaaagtgctgaatatcttgctcaatgactaccctgaccttgtacaaaagttaatgccacactagatgtctccctagttctgcagtgccttcagtggagatgaccagctacagtgctgtgtgagtctgaggagggctgtctgtctgtggtttccactgggccaggatgatggagcacagccagggcctgcccaacttcagtgactaaaacaagaatccaagggaggactcttacgcatggtgggagccatgaaaatgtgctggggacttcttattctcccttccttccttccttccttccttccttccttccttccttccttccttccttccttccttccttccttcttttccttccttcctctctttccttcctctctttcctgtctctttttctttcctttctctttttctttcctttctctttttctttccttcccctccctcccttcctctctccctgggaaaggtcatgtgtgcttttcaggtagatgttacaatgtgtgaatagcatggtgtgaatagcatgaactgttacatgaacagcatggtttccacacagggaatgcaggtggggctgcctcagaagacaatgtcagtatagaactgcataagattagagatgctgagcttatctgagtttgtgggagctctgttctcaagactcctccacagggggtcttgggacatctgtccatcaccagagcctgccaccaactgtaatcagcagacagagatctccattagagctgacactagtcctcactgagcaagcagacactggttctgagagtacttgctgggatgccctccccagtgctctgaggatagctagacaggacaggctgcctggtgtactgggtccctagacactggagcttctaactcaagacggtgggtgggtgaacaagggcacattttggaagacagacatggttgtactgactgccctggcagagtggagcttgcagcggggtctttatagcccagttccaggaaatgtcctctactgatatgtcatcactggactccctgtggactcctagcctgctcttctgactggggacaacctcctgtgatgacagtgtgaggcaaaacaggaacacataaagtcacctgctcctagagcaaaggggctatccctctcctgtcagtgtcaggctctatttgggtggacactctgcatccttactgccactaaacatcatttttaagccttgtactctggcgcaaggtaagtattggcctgagtgtatcactgccatactgtctcctacagtgacatttttcagtgctgcctgaactttgcacacagttactcagagacaaaaaacgtgagttactatcactatccgacatacctgcaatcacttgtcaggggtgttactgatgtgtatttctgtcctcaacaccacagcctctgtggcctcagcccagaagaaaagatgtgtgtctagggaatgtttttagtttggaactacagcttgagcctttgacagccatctccacctcctgctacctcacctgtttccatgaccccttgtgtcaccttcctgaacctgtgactgccctgggagtagacgagttgccccttgctttcctggatgcagcctgattttcctgagccacctgcttctaactttatcacagcctttccccaaaacctttggggttagtgcctaatttgcctctgccgttttgtagtctggaatgccatgtccacttgtttcttttcctttctattgaggcaggtcttctcactatatggtccagactggccttacctcagtttcctaagtgactggtccacgggtctttctgccctttcactccagtgtccttcagcccttcaagtcaacattcttttctggctttctctgtgctttttatcctatgtggccatgtcactaaacactctttttatctatgcctctagttttaaaatggtggaaactttctcaatggtccttccaaccttgttctgaggtgacagaaggacacccaggacccaggttcctctttgtgggttgccttccttccggtgctatgggatattcatgtactctgctcccccattacatcacaccttccttgggccatattcttccatctgcctggggggacatggaatgacttctctggtggccccatgattctactgagatgttgacagtgactctgtgaacttgaatagcacctggactaggctccaaatgggacctaccctgcagaagtcagagcaaggagaaaacagaggaagaagaggttgtacctctgtggacaaggcagaactcccatgtgatggagacagctctatgcaggccagggatgcctgtacccttgtgggagggtttgtaggttgtctctaagagggtcaaagtgtctgcttgactcctaagaacttgctctgcacagggacaggtgtctgtttcatgtgaatcatacttccatgggaaataaattttaagaattcccaaaggatacacagtgtcaccaacagcagggagtggagcctctgcttgcatcgtgtttgaaagcgttaaaaaggaagacaacattgacatttggggttgcaatgtgacggaattacagtcttttaaaggcaagaaccacttatctccactgcatgtaatattcagtgttttgttcacttgtctaattggattaaaatatttagctccctttaaaaacttgattgcgaatttatattgctacgtgtagtgtttagctcagaaagcaatagaggagcaaattcatcaatagcaatataaatttcagcatttttcatccacttttcctattctggacgtacacattcctttacagcaggcctgccttagacgaagcctggtgtgcttttcagtattactgacacacactgtgcctagatgaacagctaagcaaagtgcatgctgtttcagctgcttggggacgtttctgttagggttgcaaacccttctgttagaaatgcagcccggggtcttatgtcattctctaaaaacacccagcagcagggagttagtgacatcttagctgcatatgttcaagttgatttaaaaaaatatgcaagtcactttggttgacagtgtcttgtacacagttttgaaagaatcagggcaaactttaacagagtcagtttttatttgaaaaatattttctgggaatgtatcagtgtttatttttgagactgacaattcgggtgaaaatcagaataaaaacaaaaaaacaacaatttggttgaaatcaaattgtttgttttcatctatttagaattctttccaaaaaatcctggtttaggaggcggctttgtaatttattttatttggtgtattttctgttctattcataagacaccatctgtcttgcaggtagttaactgtgtgtgggccctgaagtcagctatgcaaagcccctgtgctctaggaaggacaaaagagtggccacttctagatctgcactctggctaccagctccctaccagtccatgagtctgggccatcctcacctgagctgcccatctccagcttcttcctgtgtctgctagttacaagcaggcctctcctcccctagaatctgcctctcgggcctgttttcagctctattcaatgagtcctctgatgtaatgagataatgtcaatgatcttgaatataatcacatatggctgctggatccatgcacaactttaaatcaaattagaaagtacatttgctgccaagaatgcttaaaagtcatagggccaactgattaaccactgacacggcagcttcagactcttgttttctaaactgtgagtgattcataagaagggactcaaagggaatccctccccagactgaatgctgaaggctgaacaggcagcctgttcagggtgacagctattggtggatgccaggcagctgaaaccagtcattacccaggaactcacaaactcatctttatgggaggacagaccatttgtgatttcttctctctccctgacccaagaacatactctgatttcctcaccagctggctccacccttcctggccagatgttaagagtctctgggcttgggctgctgacccctgaccccactccaagctgtcaagccttgcctagtactcctgggacccatgaccctcacccgaaagctacctccacatgaccactgtggcagttctggcctaggagagagaatgggtggctggttcagccctcaagtcaaagtcagactgagaggactccagctaccaccaggataaggtcaagctagtatggccatgcccacacagacagtcattggattgccttccagaggccacttattaaaagctcctcctactgtgtgtcaggaaccaccatttcaatcagtcctgagtgaggaacacactacagactagctgtgttcttgacagtgactttcctgccccccagcagctatgtaaactctgcagccggaagtggcattggcacatggtcacaaccaggaccactttactccatgggcatgaggctgtgtatgactcaaaatctaaacagaagccatttagaataatcaaggcttagaaacaaggcatttcctgttggagcccaccattcttcctctgcacaggccagggcttaggacgtagagccaatgtgaaggacgtgactatcctcccaagtagctgtctgttagaaaatgctcattttcttttgggtgctgagcagagatttttccagagtttgacatgcaacattaagctaaattcatccaggctgagaaaatggaagccttcaccctcaccatcgccacactggacacaaaggcagctgtaagcctcagatgccaagcagtccagcagagggcaggttaagtaaggcacagctgttcctccaaatctatcaggagccgcttcccctaccagttacagaggcagtcaaactttggccttcttatttcaatggttcctttaaaaactcactttaaaatttatgtttatttcaagacaaaaatgcatcacagaggccaccaagtgccaacacacagagaccaaggcaacacttgtgccaaaagggtaggctgggtttagattctgagcacagagcttgtaaagcctctctaactgctcccagcatttgctactgggagccaacattacctctgccaaatttctttcatcttggtcatcttaaaataactcccaagatagaatttcaatataaaaagatccttcagaaatgctccagagataggccagtatcagagagcaaggggcagacaagtcatttcagtctgcaatgaatttggcagttctcaggctgttaaatacctccgttccatgttgagatctgtgtgtgctgtaaagaaggcagggtgagtgtccaaaggccgagcatatgttagaggagagcctgaagtccagacagaggcaggcttattcatgccctgggtcccagtcctttatcgcatgtgacagaagtgcagtcactcaaggtggccctgctgactttggactgtgactagtcagatctctctcacatctgctcacacacctgggttatgacctcagctgagagatggactcagtacttggcacagtcaagatggttctgcctccacaggaccttctcaggaaggagagaaggtgacctcaagtatgggatacttcagcctactatgtctctgaggtcctgatgagtatgccactaccctaatacacccagctttcctgatccccatggtacacatggggacagaagctcagagagccatgagtgatttgaccaaggtcttcagtagagttgaccctggtcggttggtcggtctgtctgtctctctcctctctctctctctctccacattctagacagttgtcagtgtatggccagaccctgctggcctatacccctctagccttccagtccatatttctactcactgtctaagccatctgcctggtgtccaatttggctccttcacaactgtttacagagggactgaacaggctgagtgtcaaggcagggcagggtcatcagctcaagggcattctgattggagaagagacactgtctttcatccctctcacttctgagggcttccccactaatcatagcaagcacacgccatgggaagtccctgggtgcaatcccagttaaaggcaggaggcacctacatggtcaacagccacctctttatcataaattgcttgatggggcaagaacgaaaaaacaaacaccctctctggtctctggtactgagaagaacaggggttttgtgccacccatccaactcacctggactctcttcgccattatctaacctgaatggggacagcttgggctctggagtcagacttaggttccatttgctgtgcccctatttgctagctgaatatgcttgtttgagcctcagtttccctatctgcaaaatggagacaataatatcaatcttgctggcttgcttaactggacagtgagtgcatgttctagagagtggacttctaggcattttgctatcattccccaccccagacccattgttactgaatttactgaattaggataggacatgtgattccactcacgagaccttcccatctgggaacaactcttccttctactattacagtcatccagtcctgggggtggggggcagttcacagctgtctcctccacatgtcgggactgaccactgctgctcccccaccccctttctttgtcttccccaccagtgttgctgcatggtgtggctgcctttgatgtgactgggtgatgcatatgcccaaggctgatgagagacaagcctcagctcacacttccatgctcatcccaattggcaggcgctcccttccagcttatgacctgacccatgtgatcagcaaggatttgggcctctaacagtgcagcctagaggagggagggagagagctcatgtgtgctgccacactgcactagactgccctatccttgagctacagtgagccttgtgtatgctctcgaatggccctgggctgccccgagcctgccccacagtggtccctgtgtgcattcccactctgcactagggtactggtacttgggctgcagctgtgtctccccaccctacctgggctcgcagacggtccacctcctctgacaggctctgtcgctccaggagaagctgattctgcttgttgagcaactgcaccagctgctgggctgtggcctggccatgcttgtccagctgtctgagtctgcagaagagaattggaggtaggttctgggagctgattgctttgaagaaacacagagattggcaggtatctgctccatcagtcgtatatgttagcattccagtgctgtgacaaaatactcgagaaagaaatggcttattttggcttttctagtcatacgtttcagcccatgattagttatctgcattgagctcacaattacttagctgtatcgctttgggtctgtggcaaggcaacttcccttgtttaggcatacatggtaaaggaagtccttacttcaaggagggcaggaaatggagacaggaaactacatcaggattacgccccataataacccaacttcttcccactaggctcctccctatagaataggggcctggaaacaaagcccacaaataggaaccatggcaagcagggaacgcaatgaagatagaaacctaactgtgtagctgagggaagctcctgagagtatagacatggaaatgtagggtagctacttggctaacactggacagcacttgctaagctaggctgccttctagcaaataacaagggaaacagcagtcctctcgacatgttcatttggaaacacataagggaaatgagtctagaaaagatgaggccttagactcatgagtggaggtaaaaaatgaggggcctaaatgaccccattgttcacctgggagtggctggggcaggggcagattgcagcctggctggggctggggtaaagctccagaaaacactggactaagggcttttccattataatccctgtcagtcacaggctgtggcactgctgaccagatgtcttcaaagatcctaaatttgtcgttctgctgataggctctcctccccagacttgctaattcactccagccattatcctcatctgtgcacagacagcccatgcagtcactagaacatgtgcccatggaaggcagctctgggttaaatttagagtcaagctgccacccagagtgggaaagaaaggcaccatgctctcttccttgacctccaaagtcaggagtggcactgcccagcaaccccttgcacattagcggacatcaggaactctacgtgcacttcaaatgccagagtctggcacctggtagcacctgcatgcagctgctggcatagagacacctcacttcaggctccccaagtagtgcttctggtgggttccagcacaggcagcattacagagccacaccttaaggccttgggacaccatgtttactaaaaatgggatagtgtctggctctaagcaaaatgaatttctggaaacctggcaacagtctagtatgttacacacacagggacagatggacggatggacagagggacagatgcacgggcaggcaggcaggcaggcacgcacacacacacacacacacacacatacatacacacacacacactgactgcaaagcgtggtatatataacctgcccccatctgcctttctctgcatacactggacagggccagagtcactgcttcagagttccagccccctcatctcttcccaacacttagtgagctcctgcttccactcacaccaggtcagggggcttctcagctgggacgtctactgtgccagataagaacagggaggccagagcttgcactgcacatgcagtgtccccctccccaggcttccatggccctctgctactgttcagcaaggggccccatcaaacctgagcagtggctcactgcccagtaagggtttcctgcctgtgtctgtgccacatcctttctctgtccttggagaaggaaaactcaagtttccctgagcaaagccacaggcagtcagcactgggatgcccacgtgcctctaccccagcacaatggcgaagggcagggttttctgggggaccagtcagtctctgtgctaatccaaggaggggacagacctgcctgaagcttatgtggactgtgttgcctggtgggagttctgctgcctaggcaatctgttgacacatatgtaatcccctttctttgtagcactgtgttctgctggagccctggagtggctgccacagggccactgacatccttattttactgagaagtggttaactgtgtaatttcaaggtggtttccctcagagtcagtcctattgaggcagtggcttttggcttcttctgagaacgagtgagacgggaacatgatgtttacaagcaatttggaagcctgcttgaaggtggcagctcatgggatcaaaggccaatgctggctgagcacagggctttctgcatcagcacccagctaggaggggtgaggtcctgagatcgaaactcggaggccccccctcctggaaggaggcattcctctactcaagcctctctttgttgctcaggctggtcaaactcactggctcaagccatgctcctgcctctgcccccccaagtagtagttgttctaactgtacgccattgccccagacttggctaatgtttcaaaccaacttgatcactctctaaagctgctctcaggtatgattttcctccattaaacaaagaagtgcactcttctgttttgggggtagtccctatactgctactccatatacagcaaggaagtcaaacaaactgagaaacttaaaaacaccccaactgcacatttttctgaaaaaaaaaagtacagacaggatttagagttaaggaaatgttttgaggaaatacactctggaagctctctgaaggcacatcatgcatgccaggagaaccagcgtcttttaatttgaaagtggttgtagaagcattgcccaacccggtctgcactgtgttagtgggagctttactaccatcactcagaggcagtttcttggacagttctataggcaaatatatctcaaacatcctggtattggtcattctactcatggtttgatgacctaaattgacagctgctggcagtcaccaacatttgcgaactctgaacttacagctccacactgattgttaattattattctctgaagtacctgagagtcaccactccaatttcacagataggaaaactgaccacgatgggttaattaacttgcataagccctgcctgtacctggaataccctggaggcaaatccaggtggtgcccgcttggctatctcaccaagccaaccaacctttggcgaacatttcctaagactccagcactatgctcttcagctttgcatgatggtgacaaattaactgagaccaacaactggaaggaggaaggttttagttcatgggttcccagatttcagatcatgttcaggtatgtgtggcaagggatgccactcacctcacagcagccagggtgggcagagacagacatgaagggccagagccctgtttcccccttgtgcccgaaagatccagttttcttccagtgagccccacctcttaggggtcccaccccttctcagttgtgccccaggctggccaaacatagcaagtgctaaggtgacccttctctcaggaggtgctgtgttgcctgtggagagatgagttatgccaagccaactgtacaagtcaaacatgtgcacaggtcaagatggcaaatgcgtgatctggaaagcacacgaaaagcccaccactcactgagcatcactgtacagggtgatgtgctccgtgctttgcaaaagcaaaacctccacaatcccacaaggtgggagctacagtcccgctttcaggatggggaatctgaggcatgggctgttcagtcacctggctcgcaggctatgatatgaagagatgagtgatggctagtcagtcaggagcaaaacacagcccctcagcctttggagatgccagcattttctctctcctcactggggtgtctgcacagggtcacccctgcctgctgctcttcccaagtggcaggagctgcttttcagtgtcaggtctcatgcagttctgacattttgacatgtctaagcgtcaaggttttagccctctcctccacagggtgttcaacagtgaagagaacaagagggagtggtgatctgaggcctatgggaatgtgtttagaaggcaacccttctagaaaggcaccggacaggctgcaagccacactgatgccacactctcaggacaaagaccttagttcagtgtgtgctctccaggctcttatctcttcccaccaatgtgtggtcactgaccttccaccttgttccaggaaccctgaggcacttggggtactgtgctgtcatagaatgactggtccatgaaaaaggatatttgttttcaccaggcaggtgctggtgtgccattagggctcatattttggggacttggatgtatagaaccaccaccacctctgggccggatgaagactggggcagcagctgcctgtgctgtgccactgtcacaggctctcttccaaggcacctctaggaatttcaggtgtgtaagggacagctgtttccatgacaacaaagaagcccaggcttccttggaaatctacgggacctcctgtagtagttcagtacttatccctagcacaggtgtggactttgggagcccattccacatagaggaatactccctgagccaagacacacgggggcggtcccacgccctatcccaaaggatatgatagactctgacgacaccctatggaaggcctcaccatccaggggaagcagtaaggatatgtgataggcagggttttatttgggcggtggtaggggaggaggggagggagagggaactgggattgacatgtaaaacaatcttgtttctaattcaaataaaaaaaatctgcagaaaaatgagttagataaaaaaaaaaaaaaggcagcagcagcagcagcagcccaggcttctaaaagtacaaatgcagatgaaaatcacctccgtgcactgcaccagagcatctctattggtctaacaaccatggtctcagccacactgcagggacactaactgtagcagcacttttgaaagctatgggagacttcatgataagctagtgggctgggaagagcgtacgcaaactccagaagggcaggctgccagcacggggcctgggcttcagacacttctctgctatgaatactgtgaaagcaagtgaatacatacacttaaatttctctgttgtttgggagatggggaatatgtgtagcgtgtgagctgtgaggtctaaaaacgacatgaagggttgggtgcctagtgaggtgccacctggagtgctccgggccaggcctgtccctctgccaggggtcagtcaccatccacttcctcaacacagttccactgggtgcctcccacagacaagctggtggggatttttgtttggttttgagaggttgattttttgttttgtttgagccttggtgtagtggtaaaatgactttttcctgaaaaggccacagcccttccctgtggaggttctgactccagcaggtctcccttcctcttcttagacactcagaatttaaatccacactttccctgggagaggagtctactcaaacagcatatggatcttaaaactaaatattgtaactgttcctccctgttcctagtgaggctccagcattgactaagcaccatgggactgggttgtgagcacccggcagtcactttacactcatttctctcaggtggagatgacagcagaggaggggtcagacccgcatgctcacaggactgacagagcactgctaggacagctgcagccaccagaatgtcccacagctcctccatctcctccatagacctgcaagcacacgttccccagggcagggctgttccaagaggacgggctgcagcctctctcccacagcatccaaaacaatgaccagtgtgtgagggatagcgaagaagaggctctctccatatcacattttttagctcagcccctggctccaggtggacagtctgaggtacctagctcttgatattcaggccccagcaatctgtccaactggcctcaagctcattacatggcacactggactcattacctccccgggcatcttccctttgctcattccctccccggcatcttccctttgctcattccctccccgggcatcttccctttgctcctcttagactggtgtgcatcccatggtcatcttgacctcctcctgccccatgcttgcccatatgagctcaggtgtcttttaacattccatgcctcttcctcctattctttctagtctcccctaagttggactgatgaccaatcttccacatccaaattgttcaaacatctttggcaatcccagcacttgcagctgagatggagacaacaggatcaggagttcaaagctagccaattagccacacaagtgggacatcagcctgggctatctgaaaccctgtttcaaaataacaacaaccccaaatctctgcgccatttccccctggggtcttctgcttctacttgccttttcaaacccagaattcctacactagccagaccagaaggatctttctagaataccagatcatgtctctgtttaatggaaactgttgctccagctctagggccatcccccccttgcctgggagcagggcctttcattgtctagtccctgcatagtcctctgtcctcacacagcaggtatcccagcccttccaatgcactatgcaaaaatgctttctctctcctgccaggcacaaactggtgtgggtgtgcccagcttcacaccttctgtcctggtcctgatccttcaaggctcactgtcattgctttacccttgcaaagtatgaccagagcatccatccacaactggcagtcactgctcaccccgcctccactgtgtattgatactcccaagggcaggagcaagctcatccctctctacttccagccctgggcaaggtgccggctgtttaactgcagggatgagcaagctacttacctgtgtacaatatttacactaaatataagacctgtgatttcaggcacagtgtgtgtgtgctttaattcattctctttcagaaaagtactgcatacaaactaagcactctcagtcaccattggaatttgaaaatcttaaaataagtgaacaaatggtagacttggatgcaggaatacctactcagaacccattcacactggctacgctagcctgggcttgacttatctcagttcaggcttccatctagaagccagagtcacacttccatccagactccaaacacaggggctgggcccagtgtaagagcatccataccctggtgctgaggtgttccagcttaagagacaccaaaatgggagcgcaaactcaagacagatgactgaaaagtcaagaggagaagtgaaaggttcaggcattatgctggcctgcccctgttacctggtggaatccattcaggcaataccctggtcagcccaaggttccatgggaaagaagtctgcacgcaggtgcagaggacccctttaaaagataggcccctgcacctttacgctctctctgcccctttactctctctccctgtctctctctctccccctgtctctctctctctctctgtgctctcccgtctctgtttccccgctctgtctctctaatggcgaccggccatggcggtcagccatttacccctgttcctcttcttagtctacccattctaccgggccttataataaacttatagtcttatgtctgtctcaatatttctcttttcttctttttaaacaaaacaataacaagaagactattagcagtgtgtggaagccaggttgcagtgtgcgcaaaatgggaactgtgtggaagccagctagtggtgagtctctaggtctgctgcaaaccctgcactcacacaggcttcacctgttctcaacaaattaagccaataaggaagacaacagagaccacgtggccacagagcacaaagcaagcagctcctgatgagtaagcctgggaggtagcaagttccctcccagcaatacatgtccccaaggccacaggctggctacactctcatctccccacatcaccagtcaaaacaatgcaccgagtggaagttttgaaaattcaattaccctaattactgttggaggtaattaattttggcgtccaaaccatgctaatttcaagttgtagacttggttccaatacttaaaaattgctgctgcattttacatcattcactctcactgatgtgagtcataggctgaagaactcccgcacagggttacagtgacatcagtggctgctctgcaatttaagcatccttggcctaaaaccaccctggtccaaaatgatttcaataattctgggagagtttacacctttgataaaaaggatttacactcacagaactgttggctgtttctttcactctcagagaagttctccattggtcctgcagacacagaacagttttctggaagacagtgcggtggcagatgccatgctgtagtggagatgtgacttggtgaccatatttcggccagtacagtgtagctgaggcctgagagggtgaaggtgacttgctttaggttatgcagcctatggaagcctttaggacaggaacccaggttttttaacccatgtatccatgtatgtattatgtatgtgtattcatgtatgtgtatatatgtatgtgtgcatgtattatgtgtctatgcatttatgtatgcatgcatgtatctacggtgctgctctgatgcagttctgggctaagactgtattctatcacagaactatagccccagcccagacccttcaaagttggtatctttagggctgtgggtgtggcaaggtggcaagaggctgtctagcaagtgaaagattctgaattacatcccagtagtaaggtagacagaaagaaaaagaaggaagggagggaggggagtccatatgtgtgtcttctgtggaacactaagcataagaatttagccaaggaccttgagacacgtggcaccctgcagtgttctggaaaattctgactgaggctcattttctgagaccggggagtgtgagagcagaggaagcactctgctctgctctgcacttctgcagctagctcattccctgttctgctctgcgcttctgcagctggctcagtgaggatttgcttttgtttttgaattctttctacatttccaatctattgcaggcttctggctttgtgcagtccaatgtgcacacagctgcatttgaaaatgcctgtgcttttctgggtaccccatgtcagttcttgccttgtcaaagaccagtagcaaatcatttcaggccaaccccagtagctctcagtgaggccacagaataatgttggcaggggggaggcaagcacaggaagctgcagatcctcaagtggcctctggatgcttgccgaccgtggcttcaccatagccttccttggccactgagcagtgctcaaggtcaggtgttcaggcctcctcaagtgtgcctggtgctctagcagggtcccctgtgtctctgacagtgccacagagctccaccagagtttctgcatgaaacagtgcttcccccagaacaacttcctccccttagggaatttagggacaggcattgcaaccctactgtcaccttcttaagagagttagggacttcctgctaggatgagccccccccctgtacctttgggggacttactaggaatgacctcagtacatgagataagggacaaggggccaagcatttcagattctgggttaccggtacaacgcaaagcacttacgtagcatatgtaaggccctgggttccattttaggatctcaaaaaacagtggttttcttctgaaccatttttcttttttttaaacccagctaggtactttcttgaagcctaagttacctcgactactactttctagagcaagagcaaggccgtggttaggcctgttccactgtgcagagatgtcagcatatgaaggtgccatgggtgaacagtctgcaaagtggagtccagggctcagggccatccagagcagaggcaggagaacactcctccctcatatcaaccgtgtccctgaaaaggtgtgagaacaccaccaaggaaacgcacatccctcctccccacatcctgctggggacatctgtatctgattcctccctctagcgctcatggttgttcttttttctccttaaaaaaaaaaaaaaaagctattttatggatatggttgtttttagagtccagaggagggagttgaattccctgaactggagttacagacagttgtgagtgactgggtggatactgggaatcgaacctgcaatctctgcaagagcagccagtgctcttacctgctgagccatctctctccagtcactcttattctctctttaaccttctgttctttgaaacactgtctgcttatgtagtccaggttggtactgactcctggacccaagtgatccttcttccttagtgtcccatactcgccaatactgtgccctgctctaccatacaggattgtcccacaccccattgtcctttcctcctagatgctaccgtgtttcctaaagaaaaagttgtcccttaaggaactgcttattagcaactacaacattttactgttgcgatgtgcacggctctacctaactggcagtttctcagctaacctaatgctgtcgcctctgccccttgcagaagaggtcctttgaattaactgatagatccactttccaatttggagcacttaacgcccagtttcactttggtgaatgctctcccaagttaagccaacaacagtcggaaacccggaggcacactgccctgttgaagaacatttttccccaagaggtcctgctgctccagagacctcagccctcatggagggtgtcaagagagggcctctgccatttccttcatacaggaccatccttagggcggccaaattggtcactgagtagcgatggaggaagagtgagcccgtggcagctaagtaaccagattcagtcactacggtgtgcctattggcacacatcttaattaggttttaatgctagtaatttgataacaacccctggctatgggctagagaactgtcagtgctgaaagctttttatttagtttctcttccctttccactgaggcagcctccccactgacccttgtcgaagacccccatctgctggttgccacggtaactgaaggagaccaattgagctgaacacagcgactcaaataaaatctgcagccagaggaattctgctaagagtaataaatcatttagtaaaaggggtcctccacacggagatgagtgttgggatgatacgatagcataactcttccagctagaaggcccatgacagatcggggtgattaggccggctggagggctcatttggtttctagtgggctccggcatcggaagagacagatcctgcccagatcctgtgccaccgtcggggagaaatgagcttaacacttggcccataaatgtttgaatattaagggtggcaagagagccagctgaggcttccaacacaccttactcttattccgtattttaaggtagtacaagttcaccagtgtcccttgtgactcatgtcagtcagcggcagcatctccaacttgaccatctgtgggcaggcagtgtgctccccgaaatggaagggcactttctaattaggtgtgacccaggaagatctgacaggggccagggcctttgccccctaattttgtaaggctcctctgcattgaattatgggtagataaagggcccttgtgccctgtcctggggatctcctgaagccaaaggagttgcattttcaaaacaaaagctcagggttgtgctacttttctagcctgtccctacctggcagctcctttgttggtatgggcagagagacaactgtcctgacagcagaccaggacaggagagcaacactactataccctataccatcggtgtggttgtggagccttctcaccccacaggccactgtcctcactggctgcctggcaccattttaaaaggcaatggtcagggacttggaatgctccctgacccagagaatacactaccccatcccttggagttaatttttagtcaaaccgaaggtagactttgtttcctcctttatggatgctgccaataaaatgtttctgtcttagttttcggggaagaacagcccttcctctctgaacccacgatgcacaaccacccaggcgaccccagcagcctccagtgtggctggccaccccttgctgggcaattgtcctcctgcaggtgcagcctgccactaggctctacatgggccactggggcgtgcacgcctgccccgcctctggacaccgggggcttggccagcaccccctgcccaccatgagtgggccagcacctggcgggactgggaggcagcctgcaggggcccagctgggtggctagcatctggctaggcaaactccacaggggccccgggcctctggactttggcagaaggaggggattaaagagagctggcggttgagggaagaaatgggtgaaagcttcattaactccatgctcacagcctagtttcattttcctgagaagcaatgagaaaaacaggttggtttccctgcaacaacaggagaggtgctgtggattttatttgctgttcttacttttaattccttatttgtaaacaaacaaatgagtcattgtttgttgatgatcatagatgacccaaattttaattaaagaaaaaaaaaatcttggctaatagagaggccaaagaaatattacatcccattttaatttctatgtagtgattaagcttgtgtgacttaattgaaactggcaagacttaagaactcaaagaagtgaaaataaaacggtgctggacaaccactctctagctttttaagacccatcctccaatgtgccctgggaaccaggacttgagttcataaagaattttcagtggatgctgctttatgtcggggtctccatacttcatttctgcccccccatctttacaaagttaccattagtttcacttcccagccctgcttagaaattctccttccaaatgctttgtctctgctcactctcccaattcccctcatatttcaattcccagacactcttgaactttgcacacagtgccagtttgagcctgcccagaataatcagtgtattaaattccactccgacagtgagatttctctaacacaatctgcccaacctcaactctttccttcagaaacattctgcatttaaaaagaaactcccagcgtgaacctcctaagaagcgaatggaacagacagtgcatgtggcgtggggcatgcagctcagaaccagagaattctgtactttgtttcttctgtgccatgtgcataatgtacatgtggccgaaagtgacatcagacatggaaagtgaaacgccctgggggggggggatgtgagggtgccggccggaaaagacagaaaatatgctgataaaaacagtaacttctgctaatctacatttcccagtcactgtcttaattaagaatgttaggaaatatgttgcagtttaattgcattgtttcaagaaactccaagactgacaaattccaggctgtgcgcacttggaaagaaaaagggatcagagtgacagtttcttctaattggcgaataacaatcagaattaggcttttcacagatagcggcccccaatgaatcccgaactcacaagacagtgtaagaatagcccaacactcaacatgtcaccaagaaatggactctgggaagaagggaagtgaggtatttcaattgtgtaagaacacaatttaaaacacaaacaccaggtacatcaagtactcacaaccatggatggcacttgacatgaaattgcagagagacatcttagctttgcagaacatcggtgtttatgaaagaagttggcaagaatctatgattttcagatgaccccatttaacgagaatgtagaatcaacaccagtttgcagacacagtcccatctctaaattgtccctctcgcctactccagcccaatcacacaggccctgggctccacttttctttctgagggaggcttggtgctgctacaacagacaaggtccaatgcattgtcactcctccatgttcctctgagagaagctatgctccacacatcacatcgttcagcttttttacttaattttatgatgatgatgtacatgtgtacatatgtgtatggtgtgtgtgtgtgtgtgtgtgtgtgtgtgtgtgtgtgtgtgtgcatgcatctatgtcctgtgtccatgtctggggtgggagcagtacacatggaggtcagaaaacaagtttgtggagttggttcttaccatctacctttgtcttggtttggggcatcaactcaggttatcaggcttacacagcaagtgggctttatctgctgaaccatctgctcagcccagtgactcagttttaacctacaattgcatcctgtccttggtcccacttgttgggggggggggggctgtgcagtctgtgcagttagggtgacaggaactgtatcactattcagtgtgctatgttcccaaggggctcagcaccggccaggagctgagcagccactctcacagggtcttgagactgttaattgaaaacttgaaaaaggattatgtattgaaaacttgatggttgactctctcaggtcagccctctgctcctttgactgtccttggctattttaccttccattagccaacttaggacacacctgagcctgaattagctatggtctcccaaggaggtgtttctaccttttccagccatgctagattttgctgtatgtgtgagcagcagagcacaaaatgcttgcacgcagtggctatggctgccagcatcccaggtctcacttctcaaacttatgcacattctatattacatagtagcaatctgagttctcaaacgagccaatgaatggcaggtatggcttagcaatctaatgacttcactggtagagactggcttaatttttttaaaaaaggttacactcaagatctgcaagagtagaaggatagactcccatgggctcaccatgaagttcacaggtttatctatctgctggaatccgggtgggagacacagacttgcgggactttgagagccttcctgcagaaggcattttttcaaggccctggaaatggtaggactgagcctggagcccgggagggttgagggaaagcacacagaggagtgctgcaacatgactaattaattaccaaactgggggcagagaggagagttcacaggggcctagagcccagagaacccaggcttgtaattaacagttgaaaagttctagtcaattctctgagttcgaagaacattaaaaggatacgtaatcctggggggagtgaagcaacccccgccccagggccaggtgcctctccagcagtggcaaggctgtccccctctgccctccccccctccccgcgctcagcaccatttgttccattacacaatctcctgaagccatttagagagagctcaaacaactgcctgtaccaacgcgacacatggcttcccatgccgactctttgctaatccagacgctccaaccatctttctttaagatgccatatggttggcagaagcctgtagcactagcggcacatctgccttcctccttgcctccatcccccaacaaaagagggttagcaaggcagcccgagaggaaggctcagcgagccaggctggctggaggctccacttagggctctgacacaacatggcttttaagggataactaggaattacttgagacgccaccatttttagctgcggggcgtgacagggtttttttgggggggtggggggtggggggctattgatgatttaaaaacaagatttgaaaaataaaggagtcttactttccaaaaagttgattattttaaagccacttcggagtgctctcctgggagctgtcttctaccagagagagcctccacccttgcctgagtagtttcttttgggtcaaggaagacagacacggagagaggagcagatacccgagctggctttgttagctagcagagcggctgtatgctaatgaggccgctccacaaggggcctttggtgtgatgagcagagactgttgacactgttgacatcctggctctcctggcctgtgaggccatgggctgtctccttggaatctggcccccagtgagacagtttattcaactatctgatgactgaaacctggctctggaacgtggaacagtttggggtaggggtgggtaagaaaatagtctatcaaactcacggtcagagagacataagggaaactgacagatttcttctgcccgggaaaatattgtagatctgtgagtgacaaaggccatgatgatggcttcaggaacaaaggcctgaagagtggaaacgaagggtacaggaactgcctctgttttggggtacctggcactcagcagatggggatgccccattgatggtactaacctccacatgaagggcaagctaagtatctgacctccttgtaaattgctttggaccttcttgttggccaaccacaaacaattcctcacgtttgtggggatgtaacacaggcagaaatgaagcgactatcctggtggggccaggcagagaaaaaacagtggacgggaagaggcagcctgtctgaagcatttctttcctggcccagaggccatgacagacagatgaggagacatctttaaaggagggaagggaaacaacatccacaaggaacctttagcaatcttctgtagggaagaagacaccagactcaaggcccacggcaggtctcagcaagggagactaggtctcattatgcaggtgaagtagttgctacacagatccatcatctccaggctggggtccaacactgtgagccaatgagcaataaagctagctagctatcatcagtatgcaggcagggggtatcgaattgtaaattcattacttatactctacaacatgaatgaaaattcatgtaactgaaatgcaaaaacacgaggaatgacttaagcagcaccgggtaaaatgatagaaagtcagcccgttcagacagcaggcccggccactttgagaacagggcattgctgatgtgttccgtctttagaattgcctttgtgctgtagggctgggcttttagacctgtggcttctagtaagttgatgttcaactctgtgaataaatgtagcttaagtgcatctcatcaaaattatatttcttaatataagattcttgcagtgaatgaggtgctactcaaagaaaatgtcccagcctgaactggatgataagagctaagttctatcggacacaaggaacacaaacttcaggaatctaatcatggagactggggcatgtagaaagagacgtttgcagttaaaataaaacagatctcaattgaaatgtgtgtgtgagcatgaccctaagcaaatccttggagggctgtttcttgatacaatttaaaataatgcttacccccccccccccgctgccaggactgttagaagagttagagacagtacataaagttcctggcaccttgtggaccctgaataagggactccaccattactgcagttgctattttaatggcctgctgtggcgcacatacaaagttctttctacatgcattagctcattcaactgaaaacagctctgcagtgtagggggtgtctcttcatctaatgaatgaggcaaatgaaattcaataacaaagacaagatcatcaacagtatgagactctctgtttctctttattcttcttttcttttcccaacagggtctatgttgttcctgggttcaagcaatcctcctgcttcggccttccaactaaccagggctacagttgtgggccacagtgctcagctgtgtactgaacccttccctatgcaaaaccagtttcagtcttaacattacagatcaccaatgccaacatcatgctcattttaggaggctaagagacactgtcgatgtcttggttcctgctgatgaagcacgtgctgaaggttggcctaggtctatctcttaagcccgcaatgctaataatgaaaataacaaggtaaagataggataaaatggcaaatttcttgaaaaatcctggctctggtgtctgcacacatctgccacatggtcatctgatgaaacttaaagcatttgacaagaaaatttcctagtacaaaacaccaaagacaacaaaaaccaaaaacacccaaaccaaccaaacaaaaaacaacatctttaccaaacatccatgtgtgctccctaattctagagagctatagggtcaagcacccatgtttgaatatgttcatttaacatgtgtgctagatgctgttcacaccgtagttaaggattaaggcagaattctttataagctagcaggacatggcctatgtacttgaatgcattatacatacaagcacacaccagcaaagccgtcatcacatatctggaacctggtttaatgctgctataattgtcagaggtttctttccatgagcctttcgctaaaaattagctctcgatagaaagtttccgaaacgaaattatttgcaagggatgctggaacgttgggaagttgatgatcagatgctgacatgaaaaatgtgaagcgacagtgagatctggatttatggtgcacatatgtgctccaccagacagctctctccaaataaagccactgctcttctcttccaaactcgcctcctgtttctgatggaaggaggcaggaagctgtcccaggtgtgtgttctcgacctttcctgtgtcttctgtgtctgttggccacgcttctcttggttttcccctccaggactgtatcttccagggtccagattacactgtggatgtcaatctaactaaaagtcaaatacaagtggaaacaaatgtaaatgcctgctagcacccataactctggggtctgctgccaggtccctggtgtttactccaggaatacctggaccctggagactctgggcagagattcaatgaagcctagtgttgtctaagtacaaagtgtacaccacaggattcaaatttaaagggcaaaatcctgtaggtctctctggaatgttcttgtagacaactttatgaaggggcatgctatctctcatggtggacaccagcacggtgcctgttcagtagagggtcttactctgttctcagaggggcaaatttcaaatgatttgtctgcttgtcccaggagatccaaagagctttccattccagtgttgctaatggtgtggacagggtgaacctcctccccactggaagtgagagtgctctcctgacccagcctgtctactctgggtgtaactctgaggagtgatttcctatgctgcctgtgtccttggctatagtcctgacatacaggtattgtttagtgagcacttactataagccagggactgaacatttctgtgccttggtcattctttcagatgaagtgtaggctacacggaatatcttgctacaagtaacagcatagatgactttttttttttttttttttttttttttcctgcaagacagggtctatatagtcctgactagtcaggaacttgctatgtaaaccagggtggccccaaactcagagagacccacctgcctctgaatcccaagtgctgggactaaaggtgtactccaccattcctggcttagaccttgtactctttcctattcttccttgggaatcttagagtcgtgaaatagagaagtgtatgaggccagttcacaggcatgggacttgtggcctgcagtggcctctctctgcctggatttcctcaaagtgacagagaatcataacacttccatctctctcacaaggtcagtaggaaactatactcgttagatatggagagagtacatgctgcttacctccagctcattcgccaccctcttttggtgcgaactggaccactaaatgcaactataattgtttgctctgccagtgagagatggggcaacaaagagctcatgcttacatccttacccaaagggtctcagacaaactgcaagggcagtgaaggagccagccctgggaaagacacaaagctatggacaccacactggacagtgtcaagcaagatggtcttttcttctgcagacccctggggatcaggctgagtgtctgaacgctaaacgaggactggtaacacaataccacaatagtagacgcacacaactaaaggatggaaatgagggtggcattttatagaacaggaaatgctgcctgtcttcttgagacggcgcaaattgttaatgcaaacaaacagctgtttggaaagaaaacattatccctaaaacccagatgaagctctatttattacatttcagagacattctaattatagtgtctgaaaactatcttaccctggatatctgtgacacctaaattatctgaaaatcagagaggttaagccaaaattgaggcatctctatgagcaagacttagggagcataaaagtgcctttgtttccccagaggctccgaaggatagagctggggctaggacaacccagtcagtgacagaatggtgaacccagtattcattccaagatattaacatatgctatcttcagatcctaaaatccatcactaccactggtcggccgacatctgagtgtttgcctgcttctctaggcactccagagcactaggccccaggtgcatgccagaagttctggtacattctctgtgttcatggctgctctccaggcctgtatccagttctatcatcggaagtgttgagcattgcagcctctgtggcaggcctgggctgaaatctgtctccactctcctagaagagctgagggtccatgcctgcctttgccagggaccaggatgtacctgcccatttcccagtattcccacacagctgttacccttcagcagcgtgcaatggctaaggaattataaaagaaaccatactttactgggcctaggcagagttcatctgtgggtgaaacggccagatctggagtggagttaccccgagtccagggcacactgaacttgtacgcttgttcgttcagctcaatccagagtaaatatatagacttcaggttgaagaggcaacaacagcacacccagaaacgtgagcaacgcagtctgtccccacgctctttggatgcattttgtcactatagggtgacctgcacctgaatagccactcccatctgccagtatgcctgccattctccctccaatggcttacccttcctgctccacctcacatccggcacgcctcacagggtgccactcagtttggttagttagtgaaggcttgagactttttctaatgaaagttatggtgttacactattaatagtatacacactattattttgtctttatctcagcatcactggtttaaaacaattcggtgtgtataaatatgtctaataatgtgtatttgatttttttagtaaatccttggcattccattttaagcaggtcaaacatgcttacatgcatgcacaacataattaatattcagtataatctcagaccactttttactggtctctgtgtctttgaaatcaagtttctgctaggtgagttcattaaacattagaaacatttgcttgactaaacagaattgccaagctgtggtccgtgaatctcgacagaggcaaaggtcaaaggccacactgtaacactggcctgtcccagggcatggaaacaagagtgtaaacacctgtgaacaattggcacaaatatgcctaagctgattaatgactttctaaaaagcccaaatgctttaccaatactgccacatgcattaaacttcaattcataaaaaagaatatcatcctgaggataaggcctagctggggcatgttagctactggcagccatttttgttccactccatgatcatctttctgttcacccacattaagagctttggggtgccggtcttagtggcgcacacctttaatcccagcacccaggagggagaggcaggtggatctctatgaattcaagaccagcctcatctacagagcgagtgccaggacagctacagctacacagagaaaccctgtctcgaaagacaaaaaaacaagcaaacagagcttgggtcaaagaggatccacagcaactacccacctttctacagagggttctctgtaaagggctgtttacatcattcactccagttaccttcagactcatagaaacacaccttactcacttacctgccaagctttccaagacacctggcagagagggagtgtgtggggatgtgcctattgatggaaaggtacccaaagatcagagttggcaaagtgtacttccgcataagtggacacatcttaacctaaagaggagaggatgataatggctttcagggaaacatttaaaaaggcatcagatggtgaattcagagactaacatcgtcatctatgactttttttcttttttggttaggcatgtcattcatccctcttcacactgaaaaatctgtctatcgattcagaccatgatttgatgatgctctagaggcagagagggagcctgggtagactggagagattacaaagccatagaaatatgccagactgggcagagaggagactcagcaaagcacagagtcagatcatcaccctgccacacatgggtagccagtcacaaggcaggtgctgcttccgagacaggaaatagtctaaggttgttttccaaagaaaacggagtcaaagtgcccacaatgcatccattctgcttggccttagggatgccatgagaggctttcctgggatctacagcgtctatggccagcctggccctccatgcagtgtgctatgcctgaccctttctacactggcacatgacagttttgaacctcataccttggagacagcactttgctggtccctttggcactgggcagttgcccaagacatgtaagtagtgagtgaaagttaaatttggtgacagcaccacagtggccttgactgtgccccggaagcttctttccaccctggacacaggacacacggcacaggtgcacagacctctttgcctttcaaagaaccacagccattactctgttcagttaaaatagagttgtttgtatctgtggctgtcttgttacttttcccttccaaagaacacccccccaaaccaagaaaaacaaaaacaaaaacaaacaaacaaacaaacaaacaaactggatgaaagagggtgatgtcttggtgcagaaaaggccttggggactttccaggaaacaattcccttggcagcagctgggagcccagcagcactgtgatgttgctgacgctggataagtgcaaaacacaatacagatgctgatgtttcctgactgacccaaagacaggcatttgaaggcaactgcagaaaacacatcagtgcgttctattttcactccttcccttgctcatcaaatctcttctgtgcaccctccgggtcttctcaatagagtagtgagatatggtagcaaacaagaccagacttcattccaaggtggtagaacagctgtcagcaggatccacactgctgggaatttgcagagaggcatctatcaaagtcctcatctccagaacctctatcaaaagagattctctttcctgccttatcatgtccatgtcacctcgcacatttatatgctgagggatttggggaggcaaaggtgacagaacagagactgccgggcccgtctatgggatgtgttcctcccctacgagatcatgatgcagggctgaggggttagtaaagagaaggcagtgtgtatcacaaataataaaaaacccggagacagatactggaattcaagctgaagatcagaaaagcaaagaagccagccagaatatggagatcctgaaaactgaatcttgcatgagaccctgagctccttcttatatacctctctagtgctgggattaaaggcatgtgctctgtttctcttttagactgattcactctcatgtagcctgggtggctttgagctcacagagatccatctacctttatctcctgagtcctgtgattaaaggtgtgtgccaccactgcccggcttctatagctaactaatgtggctggctttgtatcctgacccccagtcaaggtttattaaatcataaacaatatatcaacacagcgatgcaaacctaagccttgtgctaagaaattatttaatggggtaagtcttcctggaaaagaggccttgcttatatcagatagtggctctgctcttcaaagagatcacagctgtttggggtctagaaaagacaaaagaggaaaacatgcggtggggagggatccaggtggtgtgtgtgtgggggggtctagcactcagaagaggaagccatgtaagaaaccatttccactgcctacaaagtgttatgtgcagccgactgaaaacaacaatgctgcaaggctgtattcagatgcagtggtaacccagaaataagggatgggttaatattaaattgcctgtcgcgttggtaacaaacatttctatacaatacagttcaaaacagcagaatggtaacatagctcagtgcagccaggcagtgccaagaaagagaagtgtttcccgctgatgcaaatgatcttaaagataagaaagttggcttgcagagcgtcttaaagactgccaatcatgtcaccaacaggtacagagaagtgagtcctgagagccacgacacagaattaaaccaaagactttggggctgctggccccagtcttacccagtggtcagggacaaccttcaaagacacctgggaaagtcagagtgacccagtgtactttcctttccatcaaccttatatttgactgtattttagtaaattatccatgtagttgtattttgacagctctctttacagcagtaaaacaaaatgtgtgcatcgcaaatggcaaagattcaaatttcagctatgtttatccaaaatagcactgaactgcttctgtacttatgctatactgcctacagctccacggaaggggagacagatgggatgaatttagcagggaaacagctgtggcttgaagaagagactagcaaagttctgctatcaggcttcattatgcatcaaggtaccagtgcaacgtggatccataaggcagccaaaaaagtgtttctcatttgactcgtgataattacctttcctcaacagctgacaatgttctaagtagcattaaataggtataataattaagcaaaaatacaaaaatacccaataggcaatgccttgctcaggatggaggtttccttcaggaatgctgaggagctggagctgaagggccacacacacacacacacacacacacacacacacacacacacacacacacacacacatctctgttgcaatcctccaacacatccttccagaagacattatgctttgtatttagaatactttgtatttagaataagaaacctttctctctctctctctctctctctctctctctctctctctctctctctctatttctctcccccctccccgtgtttgtgtgtgtgtgtgtgtgtgtgtgtgtatgtaggaggttgcctgtttatcaacaaccttactaagaagctttaatattgagtgatcccaaaataagaaatatgtacactactaacatctaatatactgctctgcaaacagactcttatatatatgacatatgccacagggttgaacaatatcatgctttacccaaaccagtatcattaatatttccatggtaacagaaaagggaaaatctgagaaagtctttaaaaagaagacgaaacaagataagatgagtagtagaccaatggaaagtgacctccgttaggacaaacgtttcctaacagaggggcaaagatttgtcatcctcaaaagtaggtccactagagactcctgggttcctaaatagctcactgtctctttatattcctgcccagcagaggtggtacatcttatttcctctaatagcctttcggtgagggtgtgcgaggcaatgtcagcagcatcctgctggccttgccattccactccctcagagagagcctggctgtccttgtcctggcagcagaaggaagtacattctcctgttagcagcacaggatttgcagtgctctgagcacctgtggccaccttcccttcctcacagcctcagtttcctcaagtgtagtctagagcgagctttggggatgtgtgtagagcacaataatgtaactggcagtggaaactcctgatgatggagagtgatagcttttgctacaggaaaggaaagctttcttgagttaccctctcctccattcccttgtttaaatcatctttttttttctctccagtctccaacaatctgcctcaaattaaaagtaacacaaagatatctgaaattgagaatttcagtatcttcagttttttcttacataacaaacactatttaactctgctggttactataaggtgtgtcacgacatttctactaggtagcataatgtttaatacaattttcagtaccatctcactgtacaaattaaagaataaaatggcataagttggagaaatcaagaagacactcagttcatgaatgatgggacccagaagactaaggcaggattctcaaaaattaaggtcagcctaggttacacaatgaggccctgtcaaacaaagacgaccaggagccaaggaatcttgaacacagaatgacagttagggagggtgatctaaggttgagtttccctgatagcaaggtgatgtgaacttgaacaccagcaagagtgctcctaacaaaaaattggctactaagagccaagctcagatgagtccagaaggtgcctagagaggcctctatccataccaagacacctggtgatcatttctgacagttctctttggcactgaaacattttgtgatcttattagaagagagaagtaaacacataggactggtacacgtcaatactgtctcagacacttggtgttcttgcttcatgaacagacatagctatccctcacaaccacttagcattctggttgtaggatgacatgtctgcttggagctgcacttctgggcatacagataggagtgagtcaattctgagtgactcagacccaagtactagggaggaaagcatgtacaccaaaggagaactagaagtgccgcacctcaccagcagcaccagcgacattgtcaccacatctgtgtaagatgctgccagacacctgttcagaaacaaatgatttagctgaaaaattacccaaaaggcatgctgccagtcaatacctctgaagacttgatgggccaaatgaaacagacacaggctacatgcagaatgcatttgttctgtgtgtcttccacacagttcctatattatgttttaaatggccagcactggatggtggatgtaagaagaaaggatggtgacaatgatcactgaagaatgtggacattggagtgaattacttttggtttaagacactttccatggcgcagatgacagtgagaatgtaactactttcaagtcctcaaaatcaaaagaaaagacatggctcaatctgggtatttacaatatttctacataaaattataaagcaagcaatcaactaattgttgaattgggatgaatctgccccagagaactagaggtccacttcttatccacatggtgtctgtgcctgtagcatgtgtgacaaacacctaagcgtccacactgctttgctttttccaagttcatctctgtgtgttttgtgacaatctgctctgctggaatttacaatttgaataaaacagatttgggtgcttccctgcccagagtaatgtgcaaagcgccttaaaacaaatattcttacaagacagttgatgagggcatttaacatctatgaaagacttagcacctacacaaaggtcttccggctgaactccagctcattcagtccaactccctaattcaaagttaaatatgatcagaatatgaggggtgaggtgcaagaaaagcacagttacagagagagcgacgagaaggctgcccttaaagttaaagggggggggagcacttaattctaacatcagaaattgacaagaaaaacacccactttcttttcatttaattattactttgacaattgttggaggtgaggacacattcgtgctcgtgtgtgatggcaaagatgagaagacaacctgtgagagctggttccagggatggaagcaagcactttcactttctgagccatcttgctacctctactctttccttataaatgtggagagtgaccttcagcctgggctgtccctccccatccccccccccagtgttctttctttctttctttctttctttctttctttctttctttctttctttctttcttttttttttttttgagacaggatttctctgtgtagctttggagtctgtcctggaactcactttgtagaccaggctggccttaaagtcactgagatccgcctgcctctgtctctcaagcgctgggattaaaggcatgcgccaccaacacccagcccggccccatcttttacactgtgtacttaaccagctcagtgactttaggtcttctcctcaacccaggacagacacagagctaacatgaacttctctactgcctagggcagggtcaagaataaaaaataagacctgatgagtcttctcagaccttatcctggtgagtgatgtcaacctagagagaaagtcaaggagctggggtttccaccatgacgggtgtggcacactcttgcttcatccaatggacaaagggtaggaagacttcagaagctaagatgatacaaaccaggaagaactgacacagatctgtctgccccactgatcctcactctgaagaggcatggctgaaatgtagagacattttcagccctgcttcctagtaaacactggacaaacacaaatgactggtttgttgggtaatattattaaatggagtttgcacttaaaaatgtggcaaatgcaaagggttctaataaactaactcacattcaaaagcattacaaggaaacttactattgcaaattagattgctaagtgaagaatgacctcttaactaattcatttggtaaatttggatttaatatattgggtttgcttaaagtgagatctagtggcaagagcttggctttctatcagctgaatttccagtcaggcattttgaattggggtcatttattaagttttgaagcctccagactcccacagtaatcaatataatcaagacaacaaaagcaaaggcatcaagtgtttacaactggcacacttcttcatggcaaggcaaataaaccctcacaatttcccaggaattctaaagaagcttttggagtatccatcccttcattagaaactaggaagatcccctcctttcacaatggctgtagttgtctttgaaaatgtgtcctagatttttcatgtcttgtacattacagcttttcaactcaatgtattatatacaactttaaaattggtgctgggtttgggtattaaaatagtattatgtgacagggcactttgactctttaagcagcccatgccaacaaggcattaagtatgcaggcttcacacctcaccttccttcccaatgatcacagccacatgactgcacaggtggcagtatgatcatggctctattttcttcatcaagcatctcacttgtcattgttgacaagttttctgtggccacctagccagtggatatttattatatgtactgaaatcttgatttgttgaatagctagtatgctgtgaggtgccacaggctcactctgtaaaattcagggacaatgaaagaattcttgtctagagctgtctagggagacagcaagggagaaggtctttagactgtgtagctttctcagtatggtgtctcagttattggataatttaacttctctgagtctcactttggtcttttggaggaacatgttcttattatttctaaatgagataacttattgcagtttaactgcactcaaatacaccctggcctttgaaaactaacctgatctaagtcactatggagaatgctggagaccatcagcttagacgaagggaaggttgatccttgttagggatttcagagatttccgtctgtggttgcttccctctgttgtcatcaagccttcatgtgacagtgccaggtggcaggcagtaggcagtaaggtaatccaatcatctcatggaagcaaaagacagacgaaggggctttcgtcccaatatcctggcaagggcacaccccccaaatgcccaatgccaagagcctcccaataaggctttaccacctcccattagcactacaggcccatgaccaagcacagaggcctttgaggacacagctttatccatgggtatgacagtacacactcttgttcctggaacagcaggacacagcactccccacagcttcaggataaacaagcatggattaggcctctctactcagctgactaggcatgggcaagaagctctcaattcagtcccatggctctgcttggctcctgagtctcagaatcatagcttcaaacaaagacatccactaacaacccacatcgtaaagtacacacagtgacagcattaataacctgccttatgcagcacaccctgtgacattgctaataacctaccttgtgcagtgtacacggtgacatcactaataacccaccttgtgcagtatacatggtgacatcactaataacccgccttgtgcagtgtacacagtgacatcactaataacccaccttgtgcagtgttcacggtgacatcactaacaacccgccttgtgcagtgtacacggtgacatcactaataacccaccttgtgcagtgtacacggtgacatcactaataacccgccttgtgcagtgtacacggtgacatcactaataacccaccttgtgcagtatacatggtgacatcactaataacccgccttgtacagtgtacacagtgacatcactaataacccaccttgtgcagtgttcatggtgacatcactaacaacccgccttgtgcagtgtacacggtgacatcactaataacccaccttgtgcagtgtacacggtgacatcactaataacccgccttgtgcagtgtacacggtgacaagtttctgttctgtgttttaaaggtcactgaatatataacagctagatagttgaagcaaaataccatattcatcagtgaaatggggaacttagcattcatctgttcttattttaaatttaccacagtatgcaaattagaggatttaaaaaagcatcaggcacaatctcagctaggtgcgaatgaaaagcacaatcagatctagtttgtgactgcttcaagtgtgagcgtttgccaaatggagaggggctgaggttttactactaatctgagcttacgaaaagccaatagaaagatcccaattattgttaaatacccaaagcaggaatttgctgctaaactggcgcagagtattggtctcaggatggcttttgtgaacatcttactgtgtgtactgaaatcatcacaggaataccacacacaaagctgagctttaaatacatagtgccagtcatacagcccaaagaaaacaaactaagtgctgttggcattagagactgaatcacctggtttaaaaaacattttgttgttctccccctgtcgctgaatctttttagccaggaacagcagttattctaccaacttcacatttcaaaacaggattgatagcaaaatgagataacctgatcattcctcgcgggatttcttacacatcccgaacattcacaccatatagaaatgtacagaggcgggtttgtgaatcacacccttgtggatctcagtgggccaatatgttacattgagacatcagcctactatttcaacaacaccctgtctggtttccatggaacaaactaccttcaaaacaaaatgagctacattccgtgcagccaaggggagagcaaactccagtgccaccgccctctctcacacaagctccaggagagctggctttacaagctgcacagatcctacaggcttaggctagggccttgagccatctgagaacagtgtgtgtttctgtctctgaaaggacctgtgttaccacagattacagcctgggggcaaggacacacacacccactgcagtcaaatcaaatcctgatgtgacctccagtctgaatttattttatttttgttttttgagacagggtttctctgtgaaacagtcctggttgtcctgaaactcactctagaccaggctgacttggaactcacagagatcctcgtgcctttgcctcccaagtgctgggattaaaaacgtgtgccaccaatgcccggctttgaattcccagtcttagaattcttttgattatcccattccacctagcaatataatgatatttaatcaagtctggaaaaaagtactaaaataaatgctttcttggcctaaaggtgcccattcaaaatgtactctgctaggccatgggaaatcagtactgaacacagcttgaatgacccaaaggctggaaagaatcggacctagaatccagcctggcacaatggagacagacactcaaaagaaaagcaaaaaggacctgtttgcttcccagaaaagaaatgattctgtactaaattctacctatggttttttgactgtttgttttttttgtttgtttgttttttcaagacagggtttttctgtgtagctttggagcctatcctggcatttgctctggagaccaggctggcctcgaactcacagagatccgcctgcctctgcgtcccgagtgctgtgattaaaggtgtgcgccaccaacacctggcttctgcctatgttttttgaaggtagaaagcccaactacaattccagtttaagaatcccactgtggggataggggaggtacaggacagctatgaggaaaatataggaaggaggaagggtttaagaaccagctgaaatcatgagaaaaacaacatagttatgaagcaacaacagcctttggggctagggggaaaattgaaaggctccaattttgtttcccagatagcaacacccacactgagcatgctcctactgtttgcatttccctttgcagagaaacacaaactcagcacagaaaatttagggattattagagagtacaatgggaggcaaggaaccaataattccctgactacagacagataatatactctgttctggcagcatgtgtgtgtgtgctccagtgtgtgcatgcgcacatactcaggtggagcaagatagagagacttgcattaactgggcaattggaagaaataatttgcccatctgaaaagtgagattccaaatggcttcgcagaaagtcagtaagcagcttggtggcaaaaacatttaaactttgggttacaacacatgagtaagccacaaaattaatttggtagaattaatttggtagaagtctaaacattaaaagtagaaaatcaatgctacaaagtccacgacatagttcggtatggtccctgaaatcttctttccgtatgtgtgcacatttgcatacaaggccttaatgctacatgtgtgcattacttgagacccacactggagcgcacaggggtgtggttcatcctcatgtaaggtcaggggtgaaggagggttggatcactctcagttacacagggtaaagagtgtgtgtttcccaggaacatgggcgcaaggatgggcaggcagaatgagggttccagggtgtgcacagcttggacagggctgggaacagggcatcagtggtgagacatttgtgatggtgtgaatagctgtagctcccacagactcctgtgtttgaaggcttgacttctaaggagtggcactattaggagctgtggccttgctggagtgtgtgtggccttgtcagaggaagtgtgtcactgtgggggcggcctttgagatcttagaaactcaagttggttcattccctgccgctggcagatccaggtgtagaactcttagttcccgctccagccccatgtctgcctgtgtggtgccatgcttcttgccaggatgctaatggactaaacctctgaactgtaaccacccccaattaaatgtttttctgtataagagttgccacagtcatggtgtctcttcacagcaatagaagccctgactaagacagcatccctgtgcacagggcacgtggtagacacctgatccagcttgcagggtctcctcctcacaaacaaatgctgccagcagtggcctttgtgcctatcaaggctttgggagagcaaaggggacattgagtttaatgtacaaactaggaggcagaagttcacatctgtgacagagtcaagctacagcatgaggaatatgctattttggatgtatagctatgtctgtttgcatgttatgtgtgcaaaaattagagcatgtgcatacacatgctcacacataccagttccatcctgtttcctattcatatgtcttgaatatttggcagttaatgccaataaacactttttgttcagcaagtcattttcttgacaccttatgatcccattggggagaattaatgggattaatctcttgatacttgaccctcccacacccattctgccccccagacacacatattgttacacatacatatgtgtatgtacatcaaatctaccaagcccatttacacgaatgtatatgtaacaatatgtgctatttatttatggataaatcagaagacatatttcttctgataaaatacttcatattcatttcttgaaattaaattttttataaaaactataactctgcttggtcatataaataagattatatggtcggtgtggtggtacacacctttaatcccagcatgaggaaagcagacacagacagatctctgtgagttcaaggcctgcctggtctacagagtgaattccaggatagttatagctgcacagtgagaccctgcctcaaaatataaacaagtataaatatataatgtataaattatataatatatatttacgaatataaataaatatgtatatatgaaaacaaaaatgtaagcttactgaagaaaaatttaaactcaatgaggctatgacccacaatggcctttgtttctttcttcctttccctcctttttcttttcttctctttggtcacagtcagatgtagcccaggatggcctgggatttgctgcttgcaggattgctcctcctgtatccctccttcacctcatctacaacttgtagagcattctgcaagctcattagaaattagaccagataaaaacatatcacctaacccgcctttcccctctccctcacaccccgtggccatcagacaattttatttcctagccttgtctccaatcctttcacttcctcttcctattctgatgccaggcgatggtcacttcccattcaacttccctccctgatttctaaaggccatcttcacgctgctgccaggtgaagtcaaggcctgaaggcctgatggaaggaactgaggaaagcagtcaacttggactaatcctacccattgtctaaggaaccttcaactaaaacaatgctagcttccagtgaattattatctgcatcaatacagttacacatctaggactttggagatggtaacagatggttcaccctggagacaacaatctaaggaggagaggacacagaagaccacagaagcactgccttggtgataaaaatgagacgtttactatggtaacaaaagagcgtaaccctacccaatgttgaaaaatcttactttgacaaaattcttgagtaaaatgtctggagactaagcccaaacacattttcaagtctttacatgaggtgttttgctctctgcattgaacagggagagccagaatttcaagatggaagtggccaaaggaactgcaagggatgccccacttgaagtcactctaggtaggacgccacagtgtccatgactctgtgatctagctgggcccagtcggagacatccatgcccaggagcataggggagttattcaaatgagaagtattgatgaaaacactggcatcgctgataccactgctaataccagagagcacttccagatatagtcacagaaatgactttaaacacaagacacatggaagtatgtgtgtttggttagagcaagaaatgtgaaatctcttccaagtgccaccttttaaaggcatggtcagtgaaaggagaagacaagtttccaatcctcagttgtatattgttctcttgtatagaaatcactagcactataaaaaaaaatcccattttggttgatttaaaaaaatcatgtcttagtatatcaggtcactaggggaaagaaaagcttgcaaagtatataactctttccaaatgactggcataagattggtaaagccagagtcatttatgtaactgctaacaactttagcaagtagctccattaaacatgacctataaaaccttccaaaataggggccaactacaaacacaatgagttgctacatggcctaagcggacagcaggagccatttatgctctaatgagatcaaatcatatccactagttgtagctaatactcagtgagtgcccctgggtgctcctcattccacacacaaactttgggtttatattacttaatgacagcaattagagacacatggactggggaagtttcccaaatgcgaggttatcattagacctttcaacaaatgtcacgtagaaataacacattccctatttttctcacttttgcttttccataatttgaggagaactctaaaagatcatttgtagacacatgtagacatcagaggccaaccctgagtatcattcttcaagaactgaccatcttatttaagatgcagtctcttattgggacctaggacttaattcagctaggctggctaaccagcaagcaccatcgagcctcctgtctctacctccccagcacataccaccgtgccttttttttttttttttttttttttgtagatgttgggtcctcatgcttgtgtgacaagctcattacccccagccctgaaaagatgatttttggaaagtgtattcaagtgttgaagtcatttagtgatgtccttcagagttcagggacagtgttatatacaaaagatacaaaaatgactaaattcataaggagttcaaatttgcagtgattctccttccccagactgttgaacttgtaggcatgtgcactacagccagcacaagtcagacattctcaggacaatatgacggcctgaacatttgatcaaactattgtttgtacacactgttgggtaaatcagagagtggtaagaaaggttgcagatggggcctgggaagaaagaggtaagagcatttggtaggcaacacagggacccgagttcaggttcccagcactcagtgtaaagctgggtgtggctgtggctgtggctgtggctgtggctgtggctgtggctgtgctacaagcaccttatgaccccagtgctaagaatgctgtgactctataaccaggggatctctacggctttgctgtctctatgcttagctctaggttaggtgacagaccttatgtcaaaggagtaaagcagagaataaggcaagacatatgacagtccccagtctctgcatacactcaggattttgcatacctgcataaatatgtatgtatacaacacacatacacatgctcacagatagacacataaacaagttatttccaaaaagtaaaaactgaaagaacagggtacaagttcaaggactgcctgggctataacctgtcagaaaggaagagagagagcagagatgggagagaaggaggggggaaggaaggaaggaaggaaggaaggaagaaggcaagaagggaagaagggggaaggagggtggggagggaaggaggaaagggagggaagaagggaagggaagggaagggaagggaagggaaaggaagggaagggaagggaagggaggggaagggaaaggggaaggggaaggggaagggaagaggaaggggaaagggaaagggaaggggaaggggaaggggaaggggaaagggaaggagaaagggaaggggaagggaaaggggaaagggaaggggaaggggaaggggaagggaaaaagatgagagatgagacggagatgagaagctgatctggaacttgactaacaggagcggcaggcagtggaggaggaggcataggcattccaggctgtgagaagcacgggcagggtttgtggctgccccttctgagggccacacttcagtcttcccctttcaacatctaagcatctactaccacagctggaactcattaaatatgtgtgcgtatacatgagcagcgagtggactgttaagaaatgaatgaacagcagtcttccaattcatatgtagaaatgattctagatttctggaaggggtaacaacaaaaaaatacagagaaagccttttgagagcccacaaactatggaggaaactgtttccaccctcttagctcctccaggatttacactgttgaaacccacttgagactatcctggtgcctggactaatcacatcacaagctttgccagtgggcatcaggctccccagagcagagtggatggaaacagtagctaaggctatgagcagttcttccagcctatagatatgaaagcaaggagcacacacaagagtataagagaactgaaaaaccagggctggcaagtatgtgacaaacgattagaaaacctattgggagccacgcctgtcacccgaaagcggggacgtgtgcatatttagactggtgactcctttccaactgtctcacactgcagtttatagctgtctacgccccaacctcttagccttacctgttggcttttaatttttatgaatttaagttgttgctcaactgtaactaatttaaacttaaagattgattaatgcttttaaaagtcatcaaagatttaatgtatgaaagaatattttggtaacagatggatattgcatatgatatttctttaaatcaaaacatgcaatctcttttttttcagggccgcctttcaaaaactgggtcttgaacaaaactgtgccccacacctttgggctgtagcaaatgtagcaaaagagcaaaggagcaaagagtcaggggcacaaagcaagtgtccccacatgcagcagctgtgagctgtgggcatcctactgataaaccctgaagcctaactgagaaaggaaaggggcttgggtgcatatattcattcccaacgtaaagaactaaaagccaaagttgacggaccagcttcacttatattgacacaaatatttagtgaactcagaaatataattgctgaaatactgattacatgaaaacaaagatgaatggtttaaaaagacccaacaaaactgggtttcccacgcacaaaacaaggtgtgcacacaagaaatagaaaagaaatgtacgtctcagagggctaccaaactgcagattccacacacaagctgcttaaccaaatgtctgtgtgactgcagtctttttaggaaaagcaaaattgagtgcaaagaaagatgcagtttgggtgtggtctctctgtaaaaaacaaaaacaaaacaataagcatctagattgtgtgtgtgtgtgtgtgtgtgtgtgtgtgtgtaacagacacctggccatttgatattgctttgcttgcttattagtactagtccacttggacttctcagaacacactctttccttttaggtggcagtcttctcacctgtaaggtgtgtgctctgagaatgggggtgaaggctgggtgtgggaggcaggagcagaattggggctacataatcatataggcccttctgggtctccaaaatgtcattctctgaagtctggctcaaagaagataagcagggtcccttaaaacacttattggttgttaggtatataccagatgaaagtatttaggagagaatataaaaactattaatattgagagcaaataaatttcagaaaagtaaaatcatttagaaatcttcattacaaagaaaatacaaaattagccacctatataaaatgattagaatggaatttaagtttccatcataaaatacttgtttaatttgagaatgaaaagggacctattttatatcttaaataagtgaaataagtgaaaacttttaatagtaataaaagaaaatctaaaactaaaaacaaaacaaacaccacaacccaaataaaactatgtctcaatttaaagctctaaaggaggtcacagacacaaaggacatccccccacccctggtctgaacatctctgggggcattttaatgttacagatgtaagacaaaaaacctgatcagaagaagcaaattaccaaagaaacaaacactagcatctcagctagagtctttcggtctcagaaagaaccaaactgaagttaagcccaagggttacggagctgcgaatgcacggagtggacagcagttgaccagcactgccagaggcctgggtacaagcctcagtacaggcacacagcaacagaaaattcaatgcaaattgtacccggactgctctgccagcagtgcggcttgtcaaaatatgtgtttttagaaagaaagaaaattagctaacattaacttaacatttctttaattaattgctaactaaattggcgagtaaactgcaccctatgttgaggttatacaaactatactctttacaaagacaacagtcagtctttcatctaattttccatcttctttcgacactcctatttgccattcatgagtaggcaaagtaaccccatttaatactaatttatttgctgcctgggagtctatataaatttcaagtttcttttatgattcagctattccaagagtctcaaaatatttcattaaaaattaatgtgttatccacacaaacggcaaatattgaaaactaggaatataaataaaaaataataaaaatagtaagtctactaatactgaggaggaaggcagtcaggagcgggagagcatgtgaaagggagggcgattttaaacatccggtttctattctggaccattcatgggaacagacagacacagcaagccgaagccaaatatactcccggctctgacaggatctgttttctatcttgtcattatttctttctgcagtcttcctaataatatttcttcagggttctagatttcccgacggacatagcagcctctgaggagcctataaagaactgcagcagcctgagccacattcaatgagccaggcggctttacaaggcttctagctggcgtctggggcttttcttgctgtcacttccatacaaaggcatgtgccatgtgactctgccccatgttctacatagttctcaaatcccttcaatcattttctgaggatccacctgcaagtggtcaagccataggtgcccggtctatgacagcaggcaaagaggagagactgcgcctggctcattaacgctgggacaaagaacaagctcaacatacatttgctgtctggtggtgtcacaggaattatcgtggcgaggagcaaacatgtgctaccgtattctgtgtccacgctctccactaacctgagaggaagtcacggggcttacttagcaggcatgcagcatggcatatgcttgatcctacattagaatctaacagcagggctgcactaaaccaagagaatgcagggagggttttgagagtatcaaagattggtttaatactgactataaaacacccctttgcatcaaaataagtgtccccctttattgcactctgattattttctatagaatttaaattgtacataaaattataattgtgccttgttttatgtaaattgattgtctcaattattgggaaaggattggaatgttaatggactattttgctggagacatgccaagcaaatcagcaaaaactctaacagctctaactagaggtatgcagccaaacatttacataaattatgagaccaatgtggtctcaagaatcaatcttacagtctaaaaccagagtgagcttttctccaagaagactaaatttgctttagcatccaatgttagaaggttctgtgactgtgtgaattactgtgtgattctaatttggatttatttttctaaagataataaaaattaaaaagcagaagccgtatgtgtagaaaggacatctgcggtggcacccttccccttctcgattcttacagaacaggttctttatgaaaagcaggcctctatcccgatgactgagcgaagttagatccagtggcattgtgaacatacttgaacaatgctgtacacttgactgtttgagggaaagtcacctcaggaagctggctgcacacacacatcccggccttctgccatgtacttactgcctgacataaaagcagtgtctgtgaagtcaaacacatcttctccacacttagggtcatgggtgtagggcagacctcagctgattagatacccagatggttacatgatttctatatgtaagtgatagccagggatgccagaggtatggttacacatctgcctcaaacagccagccttctaaaatggcttccacaaacactcaccatcaggaaacatgtcaatgaaggtgtaaaaatcacctcagggtagaaaaccacaaactccttccttcatagtcaagattcaagcatgatggatttaatttaatgactgtcattgtgaaatattctaggaactgaaaatttaaagctgcaagcatcttagagctctttggcattatcaatataggcatacatacagacttaggtacagaatatgtataacttaagatttgaagcaggagataaagatttcttctgatttgtaaactgctttgagtgaagaattcttcacagtggtgaagaatgaggtttactttgaggcacttctctttgtacctagttcagcagctgtagcggcgcctgtaagttattcctagtgacaactgagattggcttctcctgaagtgctggcctggcttgcataaaacaacctcaacacaaaggaaatctcaagtccacctgatagatttgtgtctataaattttacaggacgcagagttttctgacaaggagatgggtgattaacattccatgaatcaagagctgcagatgtagtgtttgcccagcacgcaggaagccctgggttggatcccgttactggtactgcataagctaggtgggagtcaagggcactcaatgcggctgttggatatttacacaaaatgtctttaaacacttgctctttacactgccacttatttaccatggatgagaaggaaaaaaaaaatcaaagagcatcaagatatcataaacccaacattctcttgaatctgtaaactccccatccccagcagaatccctgttacacttggctgaaaaaaatgcatgaaattgttccgtagaagtccacatcttcaccgacacaaaggtcagcatcatttagaaattgtaaaggcattgctctccctgtttaattcccagaagttattctgttcatcgtcaccaaaggaacaccaaaaatatggcataccacttggcagccagtcctctggcccagtacaatctcagcctactcagccttccactgcaggtgatcccacaagttcccttgtaagtcaggggaaaaagagcgaccttttggcaaaattccaccaaggtagtctacaattagaatttcctagaaagtgaagcctatgcagttctatatatctgtcaggggaacttcatcagctcacagggtgtcttgatgtcctgtttttcttttcctctggcttatttgttatttactaattaagttacttactattaagtcaatgttaaaatgaaagccctaagttactatgttgtttaacaaaagcatttaccttcttccatgtgcctggcagacacagttccagaagctggggagtttctttctttctttctttctttctttctttctttctttctttctttctttctttctttctttctttcttccttccttccttccttccttcctttctttctttctttgaatttatattggtctcttctttctttctttctttctttctttctttctttctttctttctttcttttttttcttatttttttattagttcaaattaggaacaagcttgcttcacatgccaatcccttctccctttccctcccctcccgcaaccctccccctcacccccaacctacccctcaccccatccaccctccaatccctgagctggggagtttcttttctcttctggtagatgagacagctgactcactgggagaaagttacttgcccaaggtcaaaagcaggttcagaggctggaatcagagcccaggtggagagctgcagagactgcctatctgtaaccactaggcaccatatgttcccttaggaattaaagtctttttaaaagctcactgagacttgctgtaaaagacagggacccttggagacaaattagcctcaacagtccacagcagagaatttgacccttagatgcagcagtaaagtgggaaagctgctgttgagctttgtagaggtgacagtagggacctggagcccacatccagctcaaatactgatcaactggagaaacagagatgtgacgaattcagagtgtgggctggggcagtagacagccttgtgttcctagacttgcatgtcacatatgtgcgacttagacacagcacacaagttctctgaggcctagtgtctcctgaaaacaaaagaggatggtaccacccaacagaagtgccctgaggttgacattcaaagaatctcttgctttgggcgtacctgcttttccctgctcaccagcctactcccacccttgggagaacttcccttttcttaataaagtgtgtctatttctacttttaatataaacaaacaaataaatgagtggagttcctgttacacttatcaagagccagacttggattgaagatatctaagactcatccactcaagaagtactgcaatcccatgaaactgacactgaaacagttgaatactgtaatgtaccaagtttattcgtgtgtgtgtgtgtgtgtgtgtgtgtgtgtgtgtgtgtgtgtgtgtgtgtatgtgtgtgtgtgatatatatgggggggtgcatgtgtactgtgcagtctgtgttcctttgagacaagtctctctttgaacctggaattaggctaaggccagcaagccccagcaatcctcctgtttcattacacacagcactggaattactggcacatgtatccacatcagactttttatgtggggcctggaatcagaactcaggtcctcaagcatgtaaagcaagggttcttacccactgagccaattgtctggccctgagcatgaatgctttttaaagacatttttttttcctacaaatgatttggcctttataactattctgtatggcattcaatctttatgactttaagcacaaggaagttaaaataaaatgtctatttaccttgccctagatcataaggtcataagggagcatggttggttcctccctatctgagaccactgctttcctatagtttgttgtaattccagaaaagatgggacatttcttgcaataatggaggaaataaaataacatcttggaccagtcattactgattggtccaagatgagagagaaaagagcaaatgtctgactgagtcttattgggcaacctgcatggagtctcaggaaaggagtgtagtactcaggctttcttggagatgagaagataatacaaagattccagaaaggaaggaagtaacagacacatctatagaaatgaccatggccaggggagaacacagctctgcttggaaagaacagcaaagggtggagggaatgagagaggtatgtagagggatatctcggagaactgaatttcaaaaggtgacctgcttccctgaacaaagacaagacaatgggaccattctgtcttcagcagagcgtatgcaggggatgagaggaacacagtcaagattttagtgatgacctcaaagtgtgactagaagctctgaaacccccaacacaggagggcaggaggaacctgcatttagtcatgagttctctgtagaagtcctgctgctggtccctcgaagaaatggggtttgcttctagagaatgagcaaggctttcccaaggatccagtggaaagcaaactactgactgttggagatgtgtgcaacctcctaccccctggtccaaatcactcagggaatgtggaaggaacatctctctgcctgtatgtaacagcaaatgtcaaaacaacagctctttgaggaaaaaagaaattttgcttcacagtatctcaaattacataactacttctatatcaaggacaattttaagctagaaatgtaatgcaaaatggctcacgtttccatttattatgatttattatgagctccagcacacttcacatctgctattaaggaggccacagaaaatcccatctccttccccatctccactataagccatattgagagtcaaacagaaggtctggagaacaaaaacaaaatgcagcaaaacaaaatagattcacactgagaaaaaccacagcaggactaaacaacttctttgatgggcatatcagagagtgaggtccgggagggggctgtattagtcaggttactgttgacaaaatacataaacttaaaggcatgattatttactggggccaggtttcagaacatctagtccacattgctaggctccactgactccagacccggggtagaggcagaatgtcatagcagtgggaagacctggtgagctgctcatcttgtgacagacagagagcagaagtggccaggggccagatatcaatttaaaaggcattcttgtaaagtcccatgaggttctttaagtggccacaccccaagcctgaggacctccaaccatcaggctctgcccataggacactctaatggccataaaggccagacccaagccctcaagatgtaggtggccaagctccactgatggggaatgtccttctgtgtatgtttatcttattggttaatgaataaagcactgtttggccaatgaggtgggactaggagtcaagggggattctggaaaatgtagtaaaaagtcttgcgatataggcaggaagtgacatagcaggcagactcatatttaagcagggcaagcaggaagtctcccttttctcttgctcttgctgttgcttttcctcctgctctctgctctggagctgccatgtgagccggggaagacaggacgcttgccactggcgtcctctataagtcttattataattaagactgagctagcacataagaaatcctagtcaattggccagcagcattgtaactaatataagtctctgtgttacttgggaccttaatgtggcagcaggcagaatgcgcccatatggcagcagggcttgggtggcttgggtggaaagactcatagtaacactccactctaccgtaaaagcccaagatcaggccacaaaaatccagcccattccaggccaccctggagaggtctgtctcaaagaatcactctgtaaagcctgcctcaccgccacacttggttcttcactgcttctgtcctgagcagaggcagccaccctcctctgcttctcccaataagtctcttgtgtgaggctggtgtatggtgtgatgttgtggtattccttggctcccaactgtcatgatacctttcctctcagagctgtgacaactgcattgggtatacctttcccctcagagttataacacttaaaatgctgcctgtaaccacttcctccagccagattccaccaccttcccaaatagtgacactggctaggtgaagaagtcaatatacaggcagacacctttgaccccagcactggggaggtagaggcaggtagatcattgccagtctaaggctggtcttctctatatataagttacaggccagccagtggtacatacaaagaccctgtctaaaaacatcaaatcaaaacaaacaaacaaaaagattcaatacagaaaccaatggagaacaactcttattcaaactatatttgaaggttggccactcaaacttatctatttgaaaacatctatagggatggggagaggacggaagagtacatccaggggctgccagacaccatgaggcccagctggtgtaaaagacagcagaggacgggatgacagctcctcctggtctctgcctcagctgccgccaatctcctgtcacacttaaagccacagtgctatgtccttggatgtcctgagcaggttctcccttttctcttcagggctgtgttaactagttttctttttttcttccctgtctactgaatgtattctttaccttcaagctcaggcaaagctagtttggagtccctggaagatcttgggtctttttactcatgcagcaatattttatctttatggtcactctctacttccctgagtacaaccagaagctgctttaagatctcatgcacttttgtttttgtgtggaaagctaaagaaatgctaattagtgtggagatatactaataaactagaagacagaaaagagagctcaagccaaagaatcagagtaaggtattgacatttaacatctaatggttaaaattacagaaagtattaggcaaagcagaaaacccaactgcaagaatgatgaataaaccctatttagctgaaaagtgctacatttaggatagcaaaatttctaatcagggtctgtcaacctacccaaaaggtaactaaagagaaaaggttttccagagttgcctctgtgagctcccaaagatggagttcaaggtagcccacgcaccaaagcaagggggtctatattagctgtaagggagaaattccatttcaaatacaggaatgtactttcccctgcaatagaagaacagacatttacctgctcagaagctgggacaaatgagagatgactgggccaagcacagggaacttacagggcactgacaacactgtgtaacaatgtattgatagacagatgcctcaggcagaaaacgcaaaactaaagatggagccagagaaatgaacaggtaaaggaaggtgcttgccacaaagcctgatgacctgagttcggtcctcagtgccgcagagaacagaggcctgcaagttatcctctgactcccacacaagtactgtgacactcccagctgaaaataataaatacatagatttaataacacaaaatacagaactaagagtgaagctaaagtaaacagggtttgttggtcatgctgatgaaggggtgttagctgtgaggacagcattactcttgggggagaggatgacaacacgagagactatacatgctgggggacaggtgtagagcaaacctcttgcttttttttttttgtgagcctaaaacttctctaaaaaatagtctttcaagaaaaaaaaatgagtactcctaatttccaactatactcaaaatgagattttttgaaaacagctaggtaaacatgacccacttgaagttcgacttggagcgggtttataagctgacactggctcatgctgaaagcctaaccacagagcacacggaatgtgcgctcacattcacacactaacacagcatcacagccacattccaagttacagtgcaaaatgctcaaaatcaaaagttacattcaaaattcagaaggcatttccccatagaaataacattatgtaaacatggtattttggttcacagcctaaatcacaagaaccaatttaacccataatgtaaataaacagtgatctagaacgggaggccctgcagctccagctactccccagaatccacagcagagagagaggctggtgcacatcggaggcctaacgagtgtgttgactgtgggatattgagtacactccgtgctgatcatggttctatagacttgattgtgttgagtaattttcacaatcttacaaggtagcactttatggaaagaaatgagggcgatgaaacttgcagaggaaagagcttgttatgactacaaggctcgacagtaaaggcagaggaacccagagctcactctcacctacaacacataccttctctctgttagggctaaagggcccaggactcaacccggaaggagcttctgtgattatacatctccccagggcagggatgtgtggtcagtcagtgatgcaagcacatcctgtaatgccgttcagatgctaaacactgccgttgccccgtgtgacgaaggcttgagctctagggtggcactgttgggatgtgaggagatgggaaatccatggggtctggtgtgttcttagagggcattatgggattccaggccccttctcctcctcctccctgcttctggatgtggtgtgtgagtgcatttgctctgcaatgagctcctgcccaagaagcaagaggccgcattcgtcatggactaagacgactccacaactgagatccaaaatgagccttttcttttaataaattagctgctttaggcattttgttatgtgacagaaggcagactaacaaaactaagcacgcaagagatacctggtgattaaatgaaaggcagtctttctcctttgctgagtgttgggcttacagcagccaaaagtataatgttataattatgcctttggtatttcctaagtttcttttgctgggttcctttcacgtttcatctactcccaggtggtcagctaatatagcatctgccctgttccatgaatgtaactgcacaggctgtttcaaataattcattaactcaaaataaaatcttaactcctgagaggtgaaacctctaatctattgggaggcaactatcttatttcaggtcaaacatggctccttgacctcttaggcagagtttagccctgcaaagagcaatgcattatatagagagattgttgtgaaccacagctgactttaagtctggaaaaattttaagaactggaactttctaagcagttctaattatctcagctccctcctgtcctatacaacatgcttggcttcttggtcttggactccataagtgaggcaaagatctaattcacacaaacctgtggcccatgaaagactgcaaaataaaccagtaaaaaaaaaaaaaaaaccacacacaatgtttagaatgatatgaatcaccactttcttcataaaaagaacatcattgtatattctaacagaaaggtacataaatctaacataacccagacatcttgaaaattcacatttactagtatgctgtcagttataaaaacagacttgcaaacagcatagccagggaggccttctctatggaaaactggtggtgacagggttggaggcagaggatcatgcatccatctgcttcagcaagggattagagagatgatatgcttcttaattacaattcacacagtgtgtgtgtgtgtgtgtgtgtgtgtgtgtgtgtgtgtgtatgtgtgtgtgcatgcatgcgcgcgcgcgcgcgcgcgcacacacacacacacacacacacacacacatgcgcagagacattcacatgtgtgaattcatgtgtggtgtatatatggaggtcaggggacaaccttgcattggcataggagctcttgtgtttggcattgctctagattagcccgttaagagcttccaggcttctgtctctgtctccatcttcccatggcaggcctcctgggatgctcacactgtcagattttatgaggatcccaaggagtcaaattcaggctctcatacttgaattgcagtgctttctgcccactctgaaatgtagtcactgagaaggccaattgtacattgctgtacttcaatgggttaataaaacccaaagcaaataactattataataaggctaagtctttaattaaaaccaagaacagaaacatgaaaaacaaaatgatctcagcacaaccttgataatgaaccgtaccctaaccgtccatcccacggatgacagcaagtcaaataagcagagcctgtgctgtaacgccaaaggtctgtagggcgagggcatagctagtagaatatctaagtggcttctcagtaagttggtttggcttacaaaaacaattctcagactccttaaaacactgacttaaaagtcttttagagtatatgtaagaactgatgagaaaaaacagagttttggttccgtcgtctgctcatcaccacccagtgaggtgcattggtgatgattcctctaaattagaatgcctaattcaagaaagtatctcggtggtaggaacatattttaaaccttgtgcctcaaacttaacattaagacttttggtttatataaatcacagagggtagagtgtctttcccaggtggccaatggagaccagtcctctggggaaccatttcacctcctctctggtttgtagaggccttggagcagcctggagtgatctcactggagacactgagttgtgtcatggctaagcagtattgtggactcaaaatgcctcaactagctattctgcttggctgtgtgttaaaacttggaattctcagattggcactccatgaaatgtggtctactgggaggtcttcaggtcacaggaggcgtgcccatgaagaagacagtagatcccagcccccctccttttcttcattgtcgtagtttagataagaaaggttctcagatctcatgtgttgaaggcttgatgactagttggcgacactactgagaggtgacaggactgtaaaatggcaaacatcaatggattagtccatagcttaccagactacttggaggtggggcctctttatacaaagtaggatactgaggagtaggtctttgaaggcttaattttgcctcaggttctggcctttcatgttctttgaccctcaaataaagaacagctctgctcagccacactctctcatgctattggatttacctcagtccccaaagcaatgggaccagccaaagacactctgaagcatccaaaaccataaccccaaaaaagtttttctcctttaagttgtgttctgggaatcttgtcataaggatggaaagctcactggaaagacccaccatagggtaagcagctttctctgtcaagcactctcactaacactgcatcaccacaggcccaaagcaacagggccaactgattttggacagaaatctttaacactgtgagccaaaaacattccatttcttcttataaagtgattgttttaggcacttgttagagtgatggagagctggctagcaccccagtccaagcacagaggatgctctctaaccatggtagtgagcacagtaggcccatcacactcctgaacccctcagtgaacaaagtacaggatggataagacccccactaagcacagaataaacagatctggccttggcccacctcactttcaccacagcagtcaaaccatcaggctgtcctgcagttgcaggattggggagggggctcccacagcccaaggttaacccccacttgatgtttggtgttctgacacctgtctattctctgaatctccacaaacttgcctcttttcctaactcagcaccctcaaatttctctagacttgcaaacccttttcacagaaacacagctttagagttctcccggggattgctaaagcattcattcccttattatggcatgacaccacaagcaggaactttcaagtgaaaacgtttcatttaaaatagtcataaatgtgaaaatttatattaaaatttcctatttcataaataatgtcactatttcatatatatattatatatgtatatatcacctaacgtattaattatatgaaaaaggcatgattggtcaataacataaatacattttagcaccaaaatataccctaaaatgtcaaattgaaacaaaattcatattatagaatcaaacaaattaaaatacctgaattttttggggggagtttttgttttctgaatgtataatctgatacttttatagcattcctcttttgtctgaaaatgatggaatacagattataatttcaggtttagatactaaatacttcttggataattgtgaatagttttaattctacaaaatcaaaacattgcattatacaaggtccaatattatattttctattttgaatactgacttttgaattaagtttccattatcaaaacggaatgtgggtatttcagagatgatcctgtggtttacagaattaccaagtttaaactcatcattagcttgcatatttcaatcagaagcatcagtggccttatgcacactgctcaaacaaactgctcacttatccaggaagaaagtggcacagtatggtccaaccgctagcacagccagggccgctgggctggagactgtgtgtggtccatgaaagagcacagcgttgagcagactctcctgattggctgaacccttctgaatactgaggggcttgcatactgcttattttctaggaggaacatgcgactaggtgctcattttaaaacggaagaaaacaggcattattttaacatggagttccaagactatgttcactcacgaggaaaatctaattcttttttcttgttcactgaaactttgatgatctttacaataataatattcaatgcatttacatctactccaacttaagacaaaaacttctgtgctctaaaatgtgcatgccccactaaaagctggctgctcttgctttctgtattttcttacgtctcacctcaggaaacagtggtaaatggctagctaagattttcaagtcactctaactgtcaacccactttactctactgtctgcacatattcgccatccaaaattgctcttgatgacttatctggtgatgtgcacattaccacggccaacagatgtattctgtcttactgtgtggctagcatctgcttgaatgattcctctttcccaaggcagttttatcatcggaatgaataacagtccttttcgtgtactgctcaggttgctttgtggcaagctctttggttggattttaacttatctttgaaagtgtggttgcttttgagggtcagtggccattctatccatcttattacttcatcctgatgacacatttatccctaaaggtctcagatattctccactagccaagggaaatttctacctctagcctagacctagctcccaagtccagtttccctaaaaacatgcaagttccaccagagggagtgccatatctgctttgctattttgttctcagcatgtgatggatacatgacacatagcaataatcaataaatatttgttgaagagaccaatcattcatttgctctctgacctccagttggcatgtttccctctccaggccttagttttccatctggaaataaagggacaatagcagctcctttccaggtttgcctcaaggcacatcaaatagagaacatgagtgcattttatgaactaaaaagcaatatgccagccaaacacacacacacacacacacacacacacacacacaccacacacacacagagagagagagagagagagagagagagagagagagagagagagagagagagagagagtttgtaaaggctaaaatatttactccttggacctttacaaaaacaaaaaacaaacaaacaaaaaaaactaatgtttgctgacctctaacacagaacagtttctgtctgagtttaagtaaatatcctatgagttaatgaatgaatgactaataccttgcagggctacctgtactgtaacatgctgttaagggaaggcagtctttgggctgttccccctctacttaaaacaagtcatcaaggtatcaacatataggcaccactgtcttccccaatactgttaagtttaagaaagtgcagttgatatacatttccactttcccctaattatgtcaatagaaacagagaaaacacactggtttctggaggatggagtagagatgggagcttggaagccatgaagccatctctatgagaaagctggtagttgtccagtacacaagtccaagtctacagaaatctactcatggttgttacaaaatgcatagattttattcttgggggaactctatgaccagagtttggaaatggtatattcataaaagagggttatacatatcacaacaaatagaacaccaaccaaatactacacaaaagagaaaaggaacttggaatcaatcactcaagatttgagtttgacctctaccatgtgttccatatgtgactccctgtgaactgagtttctgtctctagaaaagagagtggtcactacggaaggtacctattaggaggctactaagagccagtggccatactccatcttgtgatgaaagcctcatcagcaactccatgtagtaacgacccagagtccagacatgctggccgacttgcttagacaagcattatgtgttgagcatacacctggttagctttaaaaaaacctaacgtctactttttccacaggagctctcctgcctgtgactctgacacactcagagtgcaactgagtcatcctgggtctgcagatgaacattacctttccttcatcgactcatgcactctcccgtgctggatgcactgttcctccaattcatcatttctcttctgtatcttctccagcttgtcacacatatacattttctcttgactgagtcgaactatttctgacctagagagggtggaaacacagaaactgtagatggcaaagagtcacctcactagaatgtattttcattgtataaacaaaccgtggcactctcttaaactctggacttaggcataatagtgaagaattattttatatcaaagaaaatatttcagatattcacaatgcctagtagaggaatatgtacctcatagggactccagttacagtactgcagagatctgagagatcaagccagagagctctagttacaatgggggaactggcccttccgtggacatctatattctgaaagtaacatcattccctttccaccctgctcctagactgctgtaacgggtggagagagatgacctgcactgagaccaaaatccaccagtgtctccatggtgaccaatgatgtctttcaggacataaactaatcttcagtcttggatgacaatcccaactctaacatttgcagatcagaaagatatctaaggaaagttgtgtcctttttaaaattaaactgccagcaccgacgccatttcctcatgcctactggctcatcagttagagaagtcacactttcaatttctctacactgtaagtaattttttaagttaaccaaaaacacttttgatgagaaattagttcccttcccagaaaggactgcttcattatgcaaggccaccttttgttctagtcaagaagaccttgggtttgccaggggaaatcttatcccatagactgttcaacccaaagaccaccatgctggcaggggtggggcaatgtcagttcaccccactcctccctttgttttcatttttactcaagtgcacatgaaacagagcctgctagcatcagtaccttcaccgctcacaattgagcatggccttgaactgagctctgttcacccagacatttccctagagtttgcctttctgaacaatgccctatacctcaacttttccaccagttttcaggtaagacagagtatgtataactcatctccttttttaagctcagctaggtactctctctgcattagcctctcccactaagaatacacccgcatgtgaaacagtctacatccctggataaatgattcatgtctatccattcaaaatcacatataatacaaaaagtaacctagaagctataataatatttgaatttagtatttcttcccaaactagcatctcctgacatatattgaaatacattccaagtggaaaaagtccttaaaccagattaggaaaataataaaatacatggaaaagaacccacacctatatcctcaggctgcttccaagagaggtgccattttcaaagaaaagcacaaagaaaaatagacaataatcaaaatataaaatattcacatataaaaaaatcatatatttggaaagccatatgtttatgtttatattcagtatagcactacttatagagagaattttggtctatgacgcaatacatggaaactttatcaagaattctatcaataggacattggctatcttgcctatgtgctaaagtaatttattcacctaaaatgtagtatttgataagaacagggaaacattaaaaaaaaatcagcatgtataatgcaattccattttacaattaagctatttgggcatgcaccaaatattaatactgataatttctggatggtagaatgtttttcccttttgtttgaccatatttttctgtgttttaccaagtcttacaatagatagtgtgcttctggtgaaagtcaggactgatgagggaggaggagagggaggagaaaggagaggaggagggggaggggaggggaggggaggggagggggagacaagggtcctggtgaggacgtgcactctcagcactgtgcacttgctgttggattttacgagggaacctaaactgcccttaaaacatttagtaattaaaaaaaaaacttaagaacactgcaaaaatattcatgaaaatcagatagatgagggttacaagtaccattaaagtgctgcaaccaacaaagttacaaaaataaaggaaatatggacaatttctctagaaggtagagcatgaaaggttatttataaaatgctcaactttattactgttttcagaaatgagtaataagatttgatactactgtcaaatatatatttcatccccactgtgtatcaaacccatcttttgaagatctcaaatactctaggaagcaatttttaatttcctttttctgtgagggaaatatgcagtttaaccagttgtctaaggccagcaatggggagtggccagccctgcttgggctcttatctctgaaggggcagttctacccacagtgcaatgctcgtgctcatcatctctcctatgaacccttcagtttttgcagtcacatatttatttaggggcatctctaccgagaagaggctaattcaacacttaagcaaaataatacatattagcagccttgaaaagtctgtctggcttttgaagcaacaattcccttttaaaagaatcatcaaaatttaattatgttatagttatatttttactacaatagttaaaagtcataaacatctaatgaatacaaagaaggggtttgattacaattttgttggtgacgtatttactgacagagaaacttgctcattaatgaaacaggtagaaagcagctgtaaaactgcacacattgcatgaacctatcatgacataggctgctgtacatgacaatatttacatacacatgaaaatgatgaggagcatataaaaaataccagggttttcttgagatagtaacgtttccttaatttttctttgtgattccctatgtcttcagtaaacacaaaaatgttatttttcaaggatagactactataatatgtgctattgtaacaatctttcctgccttgtatactttgggttttttccccccactttatttataatggcaacttgcctacaagcttctgtcatacaatatagcttcgctttatgtgtacatacatcgctctttatttgggcagagctgacaatatagtcatacaactagtggcttgcaaagggaaaagagaaaacacatttaccctactcctgtatcaaaggaaaatgactctaattcattttcatagaaatgtaggtaatttctggcttttcggaagcatgaactttccctgcattttatgcagcagctacagcgtgtaattgcatttgcatgaatggaagacattttactactataattcagattataatgataattgcttttaaaggaaaaatatgacaccttcattttttattcttttggattctggtttgacttttggtaacaattaacagaaggccaatgtcagtctccttttgtagaatataatttttgtagcagcccaacctaacatcatctaaacatgcaaggagaaaaaaaatagttcaaccgggtgtgtgttcttttacttcaattaaactcacacagttggatacctactgctgccaaaacagtaatataatttatacattatagtccacatagtaaaactacactaaaagtcatttaacaatatttataacaccataaaatacagtgttaaaatatatgaactgcaatatgtaccaaaattataaaatttgtttctcatcatcagtgattaaaaccaggatcattactctagcctcaatactcacaaccctggtgacagattagaattcaaatcttaatgatcaatttacaattaacaagatagaagtgaaacaaattaaaccaaccattatatataacgagaccccatggactcccattgttcctcttaattacaaaacgcaaatcacaaatacacaatgggcagtgctagacgtcaatccacaggcctagcaacccagcgagtgacaatgacagaaaaatggggagaaggaaaatcacacagacccagttctgtgctcattcctatccttccagtgtgcaaggagagagaggctgagacctagaacaaagtgtgcttgatctccaacatggaagggctccgtcagggtgggcacaggctcatcttcagccagtgcccaacattttctaggtcttcccagaccaggtttttgatcataattcaaactgtgcctctaacattttaatgtggatttttccaactatctagggagagagaatacttacttcactttgataaagaaaaataaattgcatgagagatatctaagtgcatcgatttacctccctcaacaacctcgtaactacggaagttctcaagtgggaaggggtagctaaagtttacacttaactaaaaccagccagaatgtctgcctggtgccaattaaagacaaaatagaattaattttcttgcctcatggtaaaaaacaagctataaaagatgtaaagtatgaaccaggattttagtcttcattttaaatgggaacatcccattcacaacccctgtggtttcaggcaccactgcacacacagtgtaaagtaatgggcttatggctacagaggcttcagagacagaaacagttgtcactttcataatgcgatgtacagtttacttggggagaaaatgcatcatgacgcacacacagagatacacacacactcacactcatgcacacacacttatacacacacactcaccccaccaccaccaccacacacacacagtttcagttcattttctgagagcagccttgcaggaggctgggcagagaggcaggatgtatgggcatggagagcccagactgtcagcttctcgggcttctctgatgattcctcatgggctctagtcaaatgcctaaatctgtaagtgaagaagcgtattttcaatgctgagtccttttatttagtgtggcattgtgaatgacacaaaatgtttacagaaattttagcaaggaaagggggaaatattttttattgataataaaaaaatcatgttttattttcattaaaatttttactatagtactttgtgaaaaaccggaatcaaaatactatctggatgaaaccattattttggagactgcattcccccagtgagagaaccccttacctcaacggccatcagaaggtattcatcccaaaagtttggcaaagagtacatagacacatgccctgaagtgacaggtcttactacattatttttcttattttaaaggaaacattctgatcacagcagaagataacatcaaaacagaatgtcaaacggagcataaaagaaagtgaaaatgtcttaattccttcgaaattgggggagaaacgaggtgggattgacgagaaaacaaagaacatcaaacacaagtttaccttaaaaaccttaaaaacacaagttattttgtctactgttttgtgaagtacataaaaagtttcaaaatagaacaatttattgatgttcactgcttgtaaggccttagcctcgtgggttaccattttaattcttcagactcagaacctggagtcaaaagagcctgacccacaaagtcatgaggctccagtgtttccgggttggttctgtttggccccacagatattttcattgcaaaacagactttgcccatttggaaatgttactctgaccttgcccagtcatgaagtgtgtgctgctgggacagcagcccctgtaccttgctatggcgtaagcaagcactgggcagggggctcacagctgccttccccagttgtgggttcttcggcagctcagccaaccacagacagaaatgctgggtctgtactgagcaagctcattgtcctgtgatattctgtacccagtagagtctaacaactaatcccatactgtgtgaattggattaggctctataggtaatctagagataatttcaaatatatgagagaggagtccagcttagtgacggactactagcctagcatgtgttaagctctgggttccatttctaacaccacaaaaatatgaaataacataaaaaatatgtgggagactataggcaggttccatgtacctactacatcttttatgttaagaatgtgagcatctgtcatctatggattttggtatgatgtcagtcccgtcaccaacaccctgtgtttgtcgaggggtgacagtacacagtatgggtgcttgtcatgcctgtcattaaatgtacttttaaatcccacaaccatcctgtaacagggctttagaagtccttttatagctgacaaagctggggattaaggagactgggcaacacaatcaagattacacacccagcagtgactgacaaaccaagactccagtccagttcctcctgaatcccaaagagttctttcctgcatactgcttgtcacccacaaaggaacaggctggcaccagaaatcagaccagcatgtggagggtggcaccacacctgtttttcccattcatttatcattcattcaataagtatgcattgggtgccatctatgtgtcagatacgaaggagcatgatcagtgtacaaagcagcatccgggctgacaggtgctgaggttcaagttcatgagtcttgcaccgggaatgactgattaatttaaagaaggaaaacaggagcccagggacatagtgccggttagccctggctctcagtttaactaccatgtcccaagaatgtctactttcctcagggatatttaaaggttaatttttcctacttagcttttccaataattaatgctatgactgagcaattgtctcctttcctttcctaggctggcctagaactcctgggctcaagaaatgctcctgccttagcctgcagagtggttgaggctgcaggtggaagtcactatatccagcaattctgaactttaataggatgtataagtatcaccacggacttcagaaacactctagacattggtaacagcaatacctaggccaaaactcatacccaaagctattcaaacaattatgctttcttaatctgtaaagaaagctaattactgtctcatgctcttgtgagagttcagtatgtattattccatgcacctttgcctccttaatgttccgaatgattagcattaaagatagcttttgtgtgttcccaaagaactgtggcaacagattaaaatgcattacctatatcaacgtaggattcaaaaactgcttgacctatcttatctgtattctttattatggtaatgattattttggcctttgttcctgaactttcatggttttaaattctaaacattataaaaagccaagcaagtatacataaccataataaaatttaagttgagtagcaggtggagttggggcagagtgcttggctcctgtgcacagggccctggagtccatccttggaactgaaagggtggggttctagaaggacaatcacaaaaatatgcatatagaaacccgttctcacagaaaacttacagcaacagatgactaattttaatgttagattacaggatataaaaatgcaattttaaggctaaattttagctgtcaaacagttttctgaggatattgtataatattgccagatcacctacctgcttttttgtgacattttctccagcttcttggctaacgtgcagcactcttcctttagctttgtcagaaacgtattctgggatgtcagcaacaaatactgttcattttctagaaataacaataaccccaccaacataagttgtttgtggctttgctctgccgtgctttcaatgcccagtgctaagtgcttcagatcagtgcaccctgcctacagctaccagaccactgccagtgtcctaagtgaaaggacttatcatctggtgggacactaagtcttgggagacatttattttcacaatatatttgtatacccagaataattttgctcatatcagcttgtgtaacattttagtgtgctcataaactgtcaaatatgtcaaatgaagtcataaatgcttgtatctttgaagtatgcaagatattatatttttattttgacaattttactataaacagtgtcaaaaattctcacaaccagataattcgaaactaaaaccgaggaattctctgttacactggagttggtgctcaacacttcttatcttgtattttacccttgaagcctgcatattctccagttatgaggtaaaatcacacaactgttcttaaaaacttgattgtactttaatggtatgtgtttcaataaagttccgatcagggactgaagagactgtgatttgtgtgtatttgcaaaataaaagatcttaaagatgattttaacagttaaaaccttactcaaccctgaaattctgcccaagactcttggaccaggatgattctgttagcagtgggctcaaatgtcaatttctcctatgaactcctttttgtgttttagttaaaaaaaaaaccaaaaacaaacaaacaaacaaacaaaaaaatccagaggattttcatttcttctggctaaatgctgagaagaaactctctacatgaggcatcatgatagctgcctttctaagtaaataaatcatttaaaaagtaaacaaatcattaatgaacagtgtccatttgttaccaataggtgaaatcattttttaaccatacaattaaatataacacccattgaatcctgtgaaattcatctgtaagtaatttttttccttttcagctaaggcttgggggaaaaaaagcatatagcatacaaagaaaaataaatcaaggcactaaaatgaagcaacattttttcctggaggagacaggatcaattaaacttttgttttaatggtacaatcagcgtggagtatgtggtgcggaattataatgactgacactgtcttgttttgactaacactgtctgtgaacacacaagtcaaaagcgaaagaaccacataacgctctgactgcacacatcaaactgcctattttcaaagtgcattttactttcaaattaaaggtaaagagttactggccaactcagtctgcagaacagtgccaacgtgatgaaagatggccatctttagccaagctgccagctgtggtcaatgccttgtattagtgaattctaacagcagttgtgagaagctcaagaatgcagaggattaagcatcactctcgactgcattgggggaggtggggaatcatacaaatgctaaaaatgttcgaagctgcaaagattaaataaaggaacatatcaatttggagccactgaattacatccagctgcgacagtgaattaagaaccgattaatggctaaagcttttctccagtttggatgctgaagcaaactcattaggcttttagagtagctataatgtgtgtactgtgggaactgttcaatgctattcaggagactctaactgtaagctcagagcatttcccgcagagcttctgatgctattttctttatataacatgtgtgcctgaaaacccagccaaaaacaagccctttgtttttctactttgttgtggtctctctcagctttacgtttcttgaacacaggtaaataaactcataatccagatggtgcaacagatgtgagagcagcactctgaaatcaacagacagtgggcaatactttccattttctcttttaaacgctaactaatatgtaattcggaatctccggtgtagttagcatctgctcccttcggccagccaaaggttacaggtgttcctgatgtcatttcacagtaaggcgtgggcctggcttgtgagcaagtgcccaggctctaatctttccctaccacccaccagttttgtcgtgctgggcctccatttgctctatcttctgtgtcagctcctgctctctctgctgggcctgaagggcttgggcctttgcttcattactgaggctttgctgaatgctatctttttccagtctgcagaacagagaaacagacagagatgtaatcggcaggtgcacagacctccgtcattcccccacagaccacagacatcagacaggtagtaaactaaagcagtagaagcgaatctttctgtggtctcctctccttactctcctgaagacagacaatccaaagacctgtacagtgtagcattcataccagaggttcagtcagactaaaggttgaagttttaaaaattcaaacaaaatcataacaactaaacacttgtattttgtaactctctctctctctctctctctctctctctctctctctctctctctgtgtgtgtgtgtgtgtgtgtgtgtgtgtgtgtgtgtgtgtgagtgtgtgtgtgtgtgtcactgtgcggtgtgagggtcagagaacaccttgtgggagatggttttctggttttcaggcccttaagctttttccttatacgcacttttacctgctgggccatcttgccagccttgtattttgcatcttcacagcacacatgctttgttgttgttgttgttctatcctttctgtcttgtagtattattactctttcatcttctgaatggtcactatttcctaagactgtgaaattctaagaagaacatgacttagttctctgtttaagcaaattttattttaaagctaagctttgtagactactactggtcttgttctgagatgtaagatgtaacttcaaatttactggaggagaccgaagaggagaggccagcactgcatgcctgctttcattaagtacattcacgctcatatgtcaggctgcaatctctgaatgggacacttcacaataaattgtcccttggtgtcatgctgacaggactggaggatgaagacaacatcctgtgagtggctctctttaaaagagaacttccttttgttttgttgagactggtctcgggtaggctgggtggcctccaacttgccatgtagctgaggaagaccatggacctatgagtgctggattacacacacgcaccatggctcccagctaggtgaggtctgggcactgaccccagggtttggtgcctgtcacgcactctacccactcagttacatccccatccagagaggaacttcctaaacaagtcaagcctgagcaagggcaaggcccttgttgcaccaacactggacgcatgttgcaaatcacatttgaaaccgttgctgggtgggttcttcaagctccatgagaagcaacgtgagggtttccttcaattaagtgactcagttatttcaaactcctgatctccttgtgggcatttctcatccatgctgctttagtttactaattgagatatttactgcctcgcctttgccaaactaaaaataaacaattccataaagctatcactaccagcctatgtaccgctgtggaacttcaactcactggcttctaattatacggcaacataaggaaagcctgcactcagattggtcaatgcatgtggtaatgttgtagtgtaaagccccagaatgaaaatacacccacacctcactcaaatggaagcatcaggggtccatgctgaatgtgaaataaggtcccttctggtgctcctaacaacaacaccccctggatgtggtccaaggccttgtctcacactcggtcccaaactagtacatcgcaacaaatgggtagtcagacgaggctacttttgcttcccccttcacaccacgtattttctggctaaggatcattgcacatgtttcatcctcttcttggaatgccctggtccacccacccaaccccctacactatgcacactacacgatgccctcttgggaaaacctcaaaatcctgcccttctttctcctgtctttcccaaatcaactcttcagccctggatgcacttagtgtgtgctgtgtccatcccattctagagtggtatcataatttgctattggtttttatgtcttctcctttgtaacctttagatttcattaccctaaacccagctcagtgctcagcacatggagagtgggcagtgcacgtaaaatgactggttttttcttatgccctgccaaagttgtggggctgggggagggagcgagttggagtggacaggaaggctttaagtgagggataagtctttaggcaagactttctcagactggttagaacagagtgctcaactagatcaacgtcaggagcattgcatgacataggtcaagctgatgacttcagagcttgttgcactctgtcagtgaggagccatggccgagtctgagcactagagtccagaacagaggctggagtgtgtaaccaagactctgcgggacatgtatctgagaagggaaagtgggcattattcataatgccagaagcagcaacacaacagagattgcatgacccaagcatggactaatggttcccgacataaatgacagcagtaagaagctgcctactaagtgacactctgaactaattagagaaaggatcacaggctgagctctcttcataacgctgtacaaaagacacgccattaacgccactctacctgagagggcatgcctgctattttctatggggtaaagcatggcacacattgctgttttcctacctccgtccccctgtgccagtcctcctctgttgccctctccccttgcaagtctttctgattaggtcagcttctcatggaatcttggaacatcagatatgaaaggaaatctcattttctttcatgtaatcttttcattttagagttgaacaacagcaaaaccaaaaccaaatccacttaaaaaccctgagtgccataaacaatttgaaatccactcataagttacatagtgaatgattttaatgcataggtagggataaaattatctttgctcaagaaaacctattttataacacactagagataatgtaatagtgaacctaaagaattaacaaaaaccactcaggtatccaaggaaaagactgaagacgtcaaatgatccactaagtggaagacattatactaggcattgtatctagtaaaaataaacaaggtttagtaggcctggactctagaagggatttcaaactggaggaagataaacaataggttgacggcatgaggaaaaggtataaggaggaaggctatcaaggtgtagaatctgagagaccaactggtctagtagctggtcacctcatgaagacagctcaaccagaatcctgccggcacccctgccagtaggtttctctctatggatctctcacaattactgatggtcaaattcgcaaagctggtacttaaccttattatataagaacacaagtaatactgttaaggaatttcttagtaatcatattcacagtggctaaaaactggaaacaacctaaatgcccactacctgctatatgaatcaagtgtgtgggatagtctagccagagggaacctagaaccccagcaagaatgggagaaagtatgatacacacaacacctgaatggactctataagcagtatgcttagaggaacaggaccccaaagccattttataatcgtgtgtacttagcactctacacttagtcaccctaggctacaaaagatcacagttctaggccctgtgggtgggtgggtgggtgtgagcgaagttgtgagctgacaggaaagggtctgtgtcacagctgtgatagctcaaacactgtatgtacttcttacaatacatttaactacacacctacaatttgagactttggctatagctcgtggctatgcctccagcatcggaacgggtaagcccagcttgtactatattgtaagtccctatctcaagaaaatttaacttttcttgtaattaaatttagttcaataaagctaactttcaaaaggagcaaatataagaatggaaacatttacctccattcttcaagttacctaaaatagctgtggtctgtgctccagttccctcctttttgggttgcagctggcctgaaactttctgtgtagaccaagctggccttgaactcaaagacatccacccacttttgccttccaagtgctaggtttaaaggtgtgcactaccacttcaggaattgtttttaataaaagagaataaaaacgagtgaacaggtactagaaaggattgaataagccaagctatagcacaccttgaatcccagcactcaggaggcagagctatagaacaccttcaatcccagcactcaggaggcagagctatagctcaccttcaatcccagcgctcaggaggcagagctatagaacaccttgaatcccagcgctcaggaggcagagctatagcacacctttaatcccagcacgcaggaggcagagctatagctcaccttcaatcccagcgctcaggaggcagagctatagctcaccttcaatcccagcgctcaggaggcagagctatagaacaccttgaatcccagcgctcaggaggcagagctatagcacacctttaatcccagcacgcaggaggcagagacaggttgatttctgtgagttcagggtcatcctggtctatttagtgagttctaagaacagccagggttagatagaaagagactcgctcaaaacaaaaataacaaaaatacacagttatgcaattattagctccctctctttccaattagagttctggctgactatattttctaaaacagccacaatgatatttataattctgttttccatattattattttcttgccattttacatgtaacagaactcaaatgatccattagataaacctcaagttcaacaataagcctcggatagaagtactttatgactccagtccaactatggaccgagcggtgtcaccaataccacctgccattgacccctcccatccaccacatcttttgtcacctttgctctgagatcagaagtgccactgttacacacacaataccctgggggtacaaggtgcttactttcaaagcatcggtagtacagagtactttgtggtagtcacccctctggttgatgaaacctccaagaggctgggatttagtttggtggtgaagcacttgcctgagatttagtttggtggcggagctctggcctagcatgtcctgtctctggcatcacaaccattaccaaccccaaaaaagcatcagccataacaaaactgcaagctttatatgttgacaaaccaaaaacttttctggaaggaatgcagaaagaagtggaaggaagagcttgctgtaggtggcattttggacacaagatacccatttgatgtgggatgtccttctgtaggctgtgagtatgtgctgcttctattggttgatgaataaatctgttttgaccaatggccaggcagaacatagctcggtgggaaatccaaaccgagttatggagagaaagaaggcagagttggggagatacaatgtggctgccggaggaacaacatgcaggccatcaccataagccacagccatgtggcgatacacagatcattagaaatgggttaatgtaagaagagctagccaataacaagcctgagccatcagccaaataattacaattgatattaagccttagagtggttatttgggaattggtgggaaggatgagacttctccaactacacccatttgtctcagaatggtaacactagtcttgatcacttggtctgtatcattaacattcttgaaacaactgttttcggggcttggaaagacacctctcatttgtagaggtaagcaatgtccattataaacattttcactacaacctgttttaaactaccagagacacatctccggcctaagggctgggaagaaaaacacatgactacccacatgagctggtatcaggtagccttacactggatggggttgggtgatcgctctcaggtttctcctataggaagttaaggctttctcctttgggatcaggaggcaatcagagatgctgagattatacaaatatctcattgtataatatttcacctgttagttctacatctaataataatgccttttctattccatgctctttatcgatgttagttactgctagttattgtgctgtatcgaagaaatttccctttctccctggtgagtttcctgatctcactttggagttcttggattcttacttagtctattataacactttttgattgtttatttgaagactcagctcatcctgaagttgggtagtagagtcccttcaaactgagacctgtcactagggcaagctcattgctactgtggagtcactgctaagtagcctgtataggcaatgtcagggcatgaaacatacaagtgtataaatattaatactattaatatggatgtaagtatatgtgtacatcatccatatgaataaatgtgcataaatctgaacacttcaattataatccaaaaacacagaatctcatctctcttcttttcataactgtaatttttgtgctcaatagcgagaaacttggctcctattattttaaacatattcactgatttgttcaaacttggaagccacgtaaagtttcaaaactgctaacaacagatcagatataccgcttactagaattaaatatttgcttacagttctgttctgcacattctttttactaatgcacacacttcatgaggaaagctcccagaactgaagacacaaaacagcatctacctcctcgttatttgtagcctgctgaaaaacaagtgtttctgtcataccaggctcttcgttcacaacaggcaaaattgtaaaatcctctcagggactttatcatttaataagcatttattaatgtttatcatagactaagttctttcaatgtaatcatcttttacataaccctcctaccaaccccatttagataggttgtccttttgttttcaatttacaaataaggacccttaaaggttgcgtaagttctctcagttcctcagctaagagtgtagcctgggattccagcacactctgcctctgatatccagggatttactatgcttcagtcatttataagagatgcagagaaactacagagggctacggggactccatgagcctcattttccgtcgcccatgcatgtgacataccctgaaggtcacacctaaggttgttcctcctaatttcccagctgtcctctatgtgtggggccacttcttcctagtgtgactgtcttgtacaaagaaatacagcagcctctgcaatgacactctgaggtatcaggaacacattttttgcctcaagctggtacgacatctaggagagactgaatgtgtgcatctatctagaaagtaaatacagacaaaactgacatttgctttctcatgaatgtatctatagaacctgaaatggtgcctgatacagctgtgtagtcaataaatatttaatgggcgaataaacgaataactgctagaagaatactgtaaggatccgccccgatgcacaggtccattctactgaccagaaaaggtgatgaggaaatccccattaactaagaatttgattttgctttatcatcattatttttctaagtaatagcaacacaaaccaattgtaaccttagcagatggcatggtgttttccacattttgggatgaaccgagtgagtgttgccagtgcctgggtactgccagcagtggctgtattcttgtacttcagcaaacgtcaaaactctgggaaggaataacgaggaaaggtctcaggttccacatcctcctttcagtggcatcccccatctttcctacaataaattacgttcattttccttgctggaaactgtgtcagaacttcaagtgcaatgttgagctctgagcctcagatccaagcgtgagtcagttcttggaaagaaaacagaaaccaaaaggaggtcaaattctttcaaagaaacatacacaaaggaaaggaaatgttcaacagaagtatttctgaaaatatatctccctccaaaaatgttctcacaacatttccaaaacactggagaactcaccttcaaggcaaaggaagatgtatgcacacctagatagggcctgttggtattagacacgttctattcacattagttaccaccccctttctctctctcttggagaggaggtgtagccttaaacatactaggcaagagctctaacactgagtgcaacctgctcttgcttagaaccaatcatagactctggcttcatcctatacacgattatgccttctgtttcacaagacacagtcagatgcatcaacctgtcttttcttccaataaatttagacatatggaagagactctcttgtttaacaggaagtaccttaggcttagcagcactaaaatatttcttttctctctctctctctctctctctctctctctctctctctctctttctcgtaaatatttatttttatttctgtgtatgtggatgatgtgagtatgttggtggttgtggtgggtcagaagacagcatcaaatatcctgatgctgtagttacaggtggttgtgagccaactgacaatgtaggttctgggaacagaacttgagtcttttgcaagctctcttagccactgagccaccgccccagctccacagagggatttgctcaaagccacctgcatatctagttaactagcagagttggaactaaatctgtcttctgcctccatgtccagtgctctttctttccattttgtaatactgccttatacacagggagctcatgtttagtcaaacagtgcaatgctcattctgcaaacacttgagcaattgctttatgccaaacacaaatataccgagatggatcaatacaaaagatccggaccatgctctgaaagagtttttagtccagtcaacaaaatcaacaatgttttctctttaaagctcaactactagactgtagtaaatattgaaatagggctagattcctggggtcactcagaaagaatggacaggggtgagggagtggctagtgacagagaggggtgctgcctggaggcttatacaatgaaaggcacacagcctgagtagaaattcaccttacaaagaataggacgaatatcatgacaagagagcgggcagcatgtgcaaagacccggggaaggagggagagccaggtgcctttggaaaacgcaatcatctggcaggcacggaggttggagtatgtatgttgtggggtagcagtgagcagttggtggaggggagattattgaagaaagatgagactagagatggaagcaggagccagaacttgaagctatttttaaggccctcatcccgagggaaatagggagccaatgtagggtttcgagcaggagagtgttgtgatcacacccgtgcttgagaaagatcactctggcggcagtgagggaacagatggggaagggacaacattagaagcaggcaaagcacttattactacagcaatagtaagagcaatttctaccagggcttctttagatgtggtagaaaccacaggtatatccttaggctaaatggccatcagatgcacatttcactagcttcctgtctaactttcattggtccaggcaggggtggattcctgatgcattaagtgacggctggacaaagttcttctcaactggaaaacatttctctggtctattttacagtaccgtgtgcccaaatttccacactaaaaatgaatgtaaatctgctcctgcataaataaattagatagaatgattttggcattgcactttcacatcaccagaacttcctattttccatccataatttgtccatgtaaaccgatgtctttggtcctcttacactttccccctcccttgtgaagtatcaggttatataggtattcctcatagtccactcatctgataaacaacttcaaatcagacactcataggataaatatatattacaatgacatttctatgatcaaataaaggatgtgtatcattctgaaaaactggtttactgaagaattcctgttgctactaaaaatcttaaattatttaataggatatgcagccacatggtgaacatttggggtcacttgtagctattaaatttactgataaatatggcatagcactaagaattatcagtttggggtgccaggacagagatgtttcccttgagagcattccaggtaatagaaaactggccattttcaatagaaacatgtttaaaatatattaactatgccagtgctttcttaagcaaactacaccaaatcacagactctcatctataattaaggcccataagtggaatacaaagtcctcttgaaattatatatcagtgtcgagctatgtttcaaacatcagagtcagccaggggttggaagaagtgaggaatggtatagtaatgacagtagaatttcattactgtttaacttgtagccctcttagacaggttttcagagctgttggccaaacaatcaatgtgtctgggtataggacttactcttaacaaaacagagaagctcactctcaatgctggggtgacatttgtgtcacttgtccaccacagagctgagaagtactttgtttccatgggggccaacagacctggatgtcttcaggttcccattgtcttgttcttctcaatgagacaaacatttcttttgcctcagtaattagaatgtcatgatttgactttctttctgtttgcctttgtaacacttgctagtgacaattctcaggtatattcttcagtctcttttactttataatgtcttcacctgtcttatcctctcaggatgagctcattggaccccctgctacctttcttctgtctccatcttgatgaccagctcttctgtctacccaaaagctattttgaaacttgcttctatatttctacttgttaggcatgccccaagaagaggaatgtaagcaactgaaatcccataatacctctgagaacagatgggctttgagctaccatctctccatcccactactcacaggaggactgtggcattattttgtacacaggcagcagaacttaagaaaatggacactcatgtctaccaggcatggcatcaaagtcttctgtgtgttagctctgtgctctaagtgtgtctaacatcctcttcaatgaaaaaataaaatggggtcactaatagtacctctccttatagaactatgcagataatgggcatacaatatttttggtttaatgatagcacagtaagttaaaaatagtaattatacaatcattacacatattattattccctagaagaggactatacaaaagtgaagcaataattataataatctcaaaggcaatcaaccttgaggaaaaataaaaccttctgtcttgcagctaacagctacacgggaaatgtggtagtacacagtggatgcacatgagctctggggcacacacaagcctggatcctctaagggctgtgtgacgcccaagtggaacttcatctcagtcagcctcattgttttcattcaaaaagtgaaattggcatccgtgagaagctaggaagcaaggaggaccctaagagagacatacatgttcccccggagaaggggaaagggacaagatcttctgagcaaattgggagcatggggggaggggggagggagttaggagaatgagaaggggaagaataggaggggtggggaggacatgagggaacaggaaggttgagttggggcaagaatagtggagagcaagataagagataccataatagagggagccattataggtttaaagagaaatcaggcactagggaaatgtctggagatttacaaggatgacagcaactaacaatctaagcaacagagaagaggctaccttaaatgccctcccctgataatgagattgatgactaattcatatgccatcctatagccttcacccagcagctgatggaagtagaagcagacatcacagctaaacactgaactgaactggaatccagttgcagagaaggagaagtgatgagcaaaggggtccagaccaggctggtgaaatccacagaaacagctgacctgaacaagggggagcccttggtccccagactgacagctgggaaaccagcatgggactgatccagaccccatgaacgtgggcgtcagtgaggaggtctcagaaatttaccgcagtagatcagtacttaatcctagcataggaatggactttgggagcccattccatatagatggatactccctgagcctagacacatgggggtgggcctaggccctatcccaaaggatatgacagactcttaagacccctctatggaaggcctcaccctgcctggggagtagaaagggtatgggataggtagggtgttagctggggtgggggtgggggtcaggagagggaactgggattgacatgtaaaacaatcttgcttctaatttttttttaaagtgaaatcgggatctatggggtctccacatgaagcagatggcaagatccagtctggatcaccacttaaggggggtctaaacctttttactagactagtatctaattatcttcttcataaaagttattttcaataacttctaatgtgtcaaggatgggtggtaagatctagaacccttgtatgatgatgctggtacagcccatgtgctctgttatcttcttcctcctcgagaggtggtgcatcaggacggtcgtcacaatgaggcttggctactgccaacaaattaaagaaaaagaaataagaatctaagtgtacgctcatacaatacacccgtatctacgttatgtaccatgggaaaacatagggacaaaagtttacagctaggagacactagtataagagataactgagcatctgagatggagctaatggaatcgacatgagccatgaaacagcctcagataagcatggcaggaagggaaaaagggggcaaaaatgtcttcaatgcgttatcctgatcactgcaaacattgaactatttcctcactatttaattaaatgaaccacaccactaaaatcaatgttaccagcttccttttacttttaaacaatgtggctatttgaaaatgtctaagcatacattagcaaattttgctttccatgctggtctatctaagcagaactccttggtctacctcccatagcaaagcattattggtaatccagtgttccacaaagaaaatgaagtgtactgcccaaagatactaagtgtatatgccttatgaagacataaaaattcaaaatcttattaaaagtgaatgctatgctattaaaacaatttttttttttttttggtttttcaagacagggtttctctgtgtagctttggagcctatcctggcacttgctctggagaccaggctggccttttactcacagagatctgcctgcctctgcctcccgagtgctgggattaaaggtgtgtgccaccaatgtccggcaacaattatttttttttaaccttgataatgttctcatttaagtcagtcatcacttaacgacagaagaaaggataattccaacaggacaccgagaacagctaaggctgaagcatgcaccacattatatgaaataaatgataaggctggtagtatagcccagtggtatctcttagtttttataaattaaattaaattaaattataaattaaatctgattttaagtaactctcaaaatataaccacattagagaattatttcaatgatagcaaggtctctatttctgtacatggattgcagactgaaatagttggaaaatgtttatcattcaaccctctctctagtctttaagtgaccaataagaggatattggagagttttcccagagatttctgtgctctgtttccagcaatcatgctcccatcctagtacatttgtttttagtaagaaatgaactttttccaagttctcccagagaccacatagttatcaacctgctagccagcttagtgaaccatccctgcctggtgagttaatcttctgcctttataggtaaagctcttcttgtggtatgttatctgcaccttgagaaatacaaatatgtcagtgaaagctttcaaactcccataaaaagcagtgggactgaattttagggaggaatctaatttgaaagcccagaaagaggagtgaggagaaaagctggggtgacacagactaagtccccccgagggccccgatttcaggcatcactatcatttcaagagggttattaatagagaactcactggtagtgtctgcttcatctaaggatagactatacgcgccgcccaccgtatctgcagagagttcacacacagcaaatgcaaagcttgcttactacgcgtggggcgctctgcttctgtggggtgcataagcttagacgggaggaaggaaagtaaattctgcctcagtccagctcaggggtccacccttctcagcatcatgcagacctgtctggaggtttatagaacaaagtatccatactaacagtttattccattcagtctcagaatcacatttggaaagtttctaaattcaaccaaatggcagctaactatataaatgacagggttaccttcaagaacgctcataaaagcaaaactgtggcagaagacatggaaggccttccagtcaggtgactggtgtgggagcggttagctactctctgggtgtcgataaagtaccttcacaccctgcaccccatttcagaggactggctaagcgcaaagtggatgacaccaccttcctgccctctctatgagctgcacagcttaacacacacggactggtaagggggagcggtgtgtgtgtgtgtgtgtgtgtgtgtgatgcaacgatgagaaataagtacaacaacaacaaaaacgcatatggcagtttataggttcctaccataaattaacttagttttcctaacgtgtatctttaaaatctccctctgggagatatgtagagacttaacagaaaagttccataaggtattataacatacaatgggcttttatttacttgcttgacaagtcacactatcaattagtccaaatgaacaagacttgtaggatacaggaagagcagtatacttagtaaggagatggacagtctgcttcctgctgccactaagcaagtgtggccttgggcaagccacttatcttctgtgcacttcagttctcgctattgcagcaagtgttggattagttaaatgctttcattaacccattcatttagtaagattaagtttacaactggtacctaatgttttctagattatatgcacaaagatagccgcacataaacctacagactttatttgctactgaatctgatatttatgaagaaggaccgtggcttctacatttcaaaactcaagtggtgcctggtgcagctggaatagaacatgtgctcaatcaatgatgatttaacagcaatcaagctgttatcacttcattgaaaaaaaccttgcaaggcccccttaattaagggcccaagattcactaggatgggtacaactaacttgacttatttgggggaagttactggttccatctatgaaggacaagcaaccaaatctatgggtcactcgttaagtgtaacactaattgctggaggactttttctgtcttgcagtttcaagcccagggctaatgtgcattctagttgctacttcttaaggcccagccatgctataggcacaggaagacagccagttactttgacaggaaaggtggcataaccagctcattacaatagaagcaaatgtactccagtcattttcaagtataatttataatcatggactatttctactcccaaacagggccttacctaaactaaactgagaccaaaagtgctgaagtatacaaacaaatagaaataaaagaacaccttcctgccgggcagtggtggcgcacgcctttaatcccagcactcgggaggcagagacaggtggatctctgtgagttcgaggccagcctcgtctacaagagctagttccaggacagcctccaaagccacagaaaaccctgtcatgaaaaaaaaaaaaaaaaaaaaacaccttccttaattgataatccaagtttggttcttaatatttactgacaaaaatgtgttgtagatccgaggttaccagaaaattcaaagtattccaaacatgcagacctaggcatcaagctctgcctgatccagactgctctgattcaggaagtgtgcacttgccactccgtttcccgtgtccctagtcactatgaaagtaggcagtcatgtgtgaggataaatcactgggtactgaaagcttcaagctaattgtccatttttgttttgtctgagattccttcctaaacagctcctcctctgctggcatcttctcgctgggacctaacatggggaactttgtttcaagatgatgtgagagacaaaggctcccgcaagcagcatgcatggtgtgaccagacagagcgcaaggacgggagaaacttcaattttaaagtgtccaagaaaacaagaaaggcaggcctctcttcttgctccgctgtgtgtgcctctgtgtgcaggtgtctgcctggaggaggtcactgaaaggccacagaagccagggcaacctcagtagaggacaccaactggcagtttgtggccagcaattgtgtatttgcaggcattctccttgctgaaataagatgctggacttcacaaagtgaacagagactctgaaaaacaaaaacaacccacagcatggagcctcacattgcgaatttcttagatattacagatgtcatccaacactgcatgtatttgcttcccatatgtgaacaaaactgaagcatcacgagacgaatctgaatggaatgttaaccttcactttatttttttcttttcttagctgacgacaagattttagtattatcacaagggagcttctggctggaaaaaaaataaattaatggatgggttttaaaaagcttagaaacttaaaaaaaaaataaacaactttcaaatatctatacttgatggtgcaaagagccaagatgaatgtatttcaattgcaacttccaaactcaactcacaaattactaccattatgctaagtgttagctaccccactgtgcagttttgctttgtgaatttttaccttcctctatgaacacttttagccactgatcgcacagcctttcaatgttttctgccttttcctttaaataaactggctgtggctccttccatctggttccccttccgtcagcaaccctgcacctgttcacacctcctctcctgttggattccactgaacatttcctcctctgccagggctattctggcactcgcaacctttctgtcattcaatccatctgtcagaagtgaactttgtttaccgcaagcttctgctttcttcttcaagaagcgaagcccctcaaggtcattgtcaaatgaactgtcggcatggatttaaatcctctactgccaaccagcagaagatagagttctgttgtgtaatttacttgtgaaaattacttttgggttcgggaagacaataatttggagtcaaagtagtagagacagggtgttttaatgatcatttgtaaaagcagacagctgacatgtattttcttcatgtgtgtctgcacttctcattatattgagtatgaactatatgtatctgaagcaaaataaaagttttaaagtgaaatcaaaatatcgcaaacaagcttacactatgtaaaaattgctacatagtatgtagcattaacttgagggataaatattttcactaatgaattagccaagggagaaagtattccaattaagaaattttacaccgaaaggcttaaaatgtgcaaatacgtaccatttcaattataagctaaggattaacacacagctccatcactgctttgaaaaatttataatccagaatatacatattaacccatgcacattttaaatctagcaccgcaaaacaaggttctgcttaaataataagaaaatagaggctgccaagcaaacacaatccacctaaagaagtgtaagctgcctgacagattagctctgggaaggaacagcaacccacagaaacagagtgggaactggatgttcagttgaatcatttgtcatctatagccacggttaccaggctcacaagacagacacacagaaccccttaaggttatttatttatttattagtaattttagataccattattgtccaggaaagaaaagaaaaacagcaactctgttcaaatctatcaattcaaatttaaaaggggaagctattctttagttatgtaagcactgtcacaacgcaaatctaaatatgacacagtggcattcactcaaggggctgctacatattttgtaggaccaccttgagattcaaacaaatctcagatgctatgttaaatccaacagtctgcacatttttataaattccttgtaaattaaagaattcaaattttcttttaaaaattgaaagcatattttaatatataaccaaggaatttaaaatttgaccctaagggttttgattggctaaatatgtataatttataaaacagatttttctcaaagcagttttctggacatgtgaaggaaaatcattgtgttgctaaatacaaagccaaacaaaatttatagcttaagatctaactgtaggtacatatttagcaccaattcccaatatattactgaatatattatttatatccttatgtaatatgcaataatatttaatacatggattttgtactggaaatataagaccaaaggggagtattcttttcttatctccctgcaatagaatttcccaatagtttctacttcatgggaagaaaattcaaaaactgcatctgatggatccagcaagctcaatacctttctgaatttttccccctttagagtaatctgtgtttgatgggagtttggtcactgggtccctgttctggatggcactgatcaagtactggtaattagatggcctctgtggtggcctcactacatgaaaggagctagaattagcagaatgctaggcagagaggcggcttgcaaggaaccctggctcctcagaaaaccatgtttcagaaagatactggtagccttcttttggaattgatagataacagaaacaaatgagaaaaatcagtgagctttaatattacttccagccacgcatgggcacctgaatgcatacttgaaaatacacttcccttccgtaaaagcacaaggcacagaaaaggggggcagcatcaggctattcttacagtaggactcacttaggaattcagagaacacaaatatttttctgcctaatattcaatgtgcttactttatctttgaaatgggaaaactaggaagcagaaagtttagtttgatagcaacacctgagacataaattctacaagaaaaaaaaaaaaaaagacaccacagtaatgttgccaggttgcagtagggaagaggaaagccgtttctaagggcactactaggtgaagacagagctgatgccgttcacatctttaatgccagttttcctaaaacagcatatgggtgtaggatggatggtaaaacacttaagctccttaataaagagctgatgttagcttctcttcattctgaaagcgcctggctgttcagcttttctaagaattacccaggctagagacactaccgtttcgccgggttcattggttttttgtctgctggtattattttgacaacagaagatattcatttttcaccccttcatcagttacctgaaggcaagacctgctttgacacataaaaatattgcagatctatgggacaaagacgtgagacattttcatagacttgatgagggtgaaaatgggtttgcaagactctgttaagaattagaggagactaaatgacaactttttaaaatctgccacaatcatttactaatgtgctgctatatcaaataagtctaattttttgacagcaccaaattagatttattgcagaaaccgctgcataaatagcatatggctatgttataccaccgatttcaaatcctggtaatgttcccttccccctccaaaatgaataaattgagccaaactataaaccttctggaaaaaaaaggagaaagaaagagacaagtttgaaaacagatgtcagagaccttggtatcactgtcaaagtcatggcatttgcacaaatgtactgacctatcaagaatgacagctccttaatacataattaaatttaacaggttggattctcattttttttgcaaagtaatttgatttttgttttaaggttagggctctaaagtatgcttagattttgatgttcaatccacaattacatggggcaaaaaaaggaagaggaagaggctctaagtcagacacagcttaagtcaggttatgaggaattattaaggagtcatgcacatatcatctggttgcttttagttttcttttgtgagagacatatgtggtagaaacaatatcacaaagtcttttttaattttaactatagtcctgatgctgcaaaccgatacataaaatatataaagtgatcactctgtgtgccacaacggagactagaatgccagagccacacatgctgcaaaaatcaaacttccacggaagctgacactgaaaacccatgcgataaattcagagatggacagttcccccattctcagtctaacacctccccacccccgtccaagtttgacataatccaactcaattctcctttttgcacaaaagtttcagtttgtccatagatgggaaagacattgcaaggtcttctctcagaccaatgggcacaccactgcaaacatcatggcactcagctaccccgcaggctccctctctgtggtcagccttcccagctgccctatctgttactgtctgattagttctgctaaggagcccctcccctgccagctttcagtgccatctgttccacacaagatggctgctgcccagcaacctaacactgccctcctacctggcacccggctaccatccttaccccaaagtgctaacacaggttctcgctgctggcagagtcaggatttcattactactactttgacaagtgcagggttgtttgtaatttctcttttatcctgattttgattgtacaaccacctcccactgattcggtttgcttcagttttgttgctcacagattttactctccacattaatctccctctggcatgttactgcatctgttcccttctttattattaattttcaaattcccaccatttttgacaaaaaggaggtaatctacactctgtttctgcccatttcattttctttaatttggaagataagtatgaaagcatgccaaagaagttaattctccgttaacagtttgttttctggcatccctaagcctttgtatatgaaaaacagatagggataaatgttgacggaatcacaacaacagagttgaaccattgctgattctaatgaaaagcaaacatatgaaacattatctaagaagtttattagtgacatgagttgtctcctgcgacattattccctctacttttaacagataatcctttctgaaaatcattctgggtgcaggatcaaaatgtggattcctctgcagttctgacacgggctttcttctgctaaagatggatttcattactcttaataggattatcatctttcctcagcctcaacattgttgatcaattcactaatgactcggaatcaatgtctcctttcagagacaggtcaagaacagaagtgccaccagtgctcacagcctaagttaaggagcccctgggttgcaatcctgcttccattagcaaaggacaatatcaggaagggatggatggctttccctctcaagacaaagactctgaggttagaaaacaggaagtgacatatttagcaaaatactctttgtagcctgaatttgtctcactcttcaaccttgccaaaagggctggaataatggatcatgcccttaattgtctcaagtgtccagacagaacattgtgacgactaattagtttattttacacgaattcatattaaagcattggagtccctgaacagatagaagaacaacccctctgatttacaaagattgtgttaacatgattttacatatctgtacatcctcatcaagccacagttgagatctgtagaaatgaagagcagttgggggttttccccaaggtaaggaaacaaggacatgtgtcaagatcaggtgaagctgatctgctgaagcacaccacatcaacccctggaaagcctgcaagggcagcccacttacagcacctccaaccctcgtgacatgttactttattttagaaatctttagctagtagaagtacatttatataaaatcacccctctaccttttggtaaatctctcaaacagaaacgtaaagacaaagaagtttccaaggccaacttcttacagtatcttctctggagaagcaatccttcctagtccccagaacccaagcagcaattcatctttccctgtccactccaggacatggtcaaagcagcagctactcagttctgtaccaggtgataggacgcatgtagggggaggccacacagagtcacggtggagcatagacttccctagctagatgtgtgctcctaacggtggctttaacctaccatctgatacttgctcggagctgaagttgactataatctcacttgtgtatatggcccaacagtgcagcagtgtgagcaccatggggtagactttatctgagtcaggttactgaggagactgaaaaaaatctcccagtctcttaaaccatctcaggcattttaataagcttcacttctaggggttttcagccaatgactcattgtgtaataaatgtgtgactattaaatagaacaaaaatgagtaatgcctaataactgacctactaaacaaaatccagttaggagggaggtggtggtggaaaagaaatgaaacatcattaagtcacctgactgtttcagtcccttgcttttttcttacaattgtattggagaacagactttcttttagaaacgctctgactggagagtattggactaactacaaactgctgccttcccccttctatttccactgaacttgatgctcattgctgttgagtcaggcaagtggtatgggccatactttctcggcttcctctgggcttcttagaaaatgagttggctgctgctgccaccatgctccaggctgtgggcctgtgtggcaggggagaagagagcatccccagcgtcaattttcattgcacacacatttgggcgttgcagaactgagaggagcgagccagggaacgttgagcagaacctacagacacacatttcctggcagcctctaattcaagccctctgccccagggccacattgagaccagggggcctcgcctgtcagacaggtggagagaccatgcacaggcactgtggtgtccaccagagcaaaatggaatgcctctctcttcctggctctttgacagcttgctttccttgatactgggtgggggaggaaaagaggatgcaatttataacagtaccaaggccatctattttgagccttgaagatgttggttgcacatatattcatttaaaattatttttgacacgttctctgcttaatttattcatgaaaggagtacaagagggggaaaatgagcttaacttttaaatggaaactttaggctaaaaattcttgaataaaaatcaagaggaaaaaaatgaagttaactgtataacggcaagaaacacattgatgctgcactgtctttctcaatgagcccagggttgtgacctaaggctgtaactcataagtcacttcttgcccatccttttcttaatgataaaaagcagaggtaaatttatgctaaacacttgatgtcaagtttggtgtttggggactaaaaataagagagctctgggtcttgggctcaagagttgagattttataacactcaaagtctacccatctctggattgttgtgtgtgtgtgagagagagaggggggagggagggagagactgtggcatctaatgtcctactttaaggcctgcctttttctccctagttgtaatttcaagccccacattttgagacagcttccttatctattaaggactgctctccatctaactcagtgttagcactaagacatggaggttctcaaacttcttgtaattaaacaagtttgtttgaattcctgatcatttgcaaagcactagttttgtaaacatgcaacacaaatgaactgaacattaatttaaaaaaaaactcatttatcacccattgttgcaatttaaatttacatagctgttataggtatgtgtagctcagtggtcactgtgtgcatagcatacatgagaccctgaattcaaccaccctaattcaaaggaagagaacaagtgagggaagaagggagaaagaagggaaaagaaacttgtcttatatggacagtaatttgtttctatgctgacccaatgtgtgtgattctcacaccacgatgctgtggggagtcaggcaatactggcacatgctggtgcattctttactcttgcttcttgcatcaaagagttcattctctaaattaaagaaccaaatgaccttgtgaactggccatgcctcttcagatttccactggcaatgggcaatgccaggctcagaccaacatgaacagaaaagctttcttctttgccctcttctctctccaaaccatttctcaggccaaggaaaacttggggtgatcatattttaaagtgaacagggacagcagagcagacacccgctctttccttacccagggtccttcacactgtcctcctagtaaaagaacttcctcccagcagagagtgactgtcccctggctccctggggctctgctaggctgcagaccatcatatcccaaaggcagccatgtgcatatggacacaatctgcttctacgcgggtggtcctggaatcagaaattctgaaagtggaggctgggaggtcatatacttgaatttggaaatcaaaggcatctcctttctttctctgcagtttcagaatgaaggatttgctctgggagatggaaaaatctggaagaatgagccatcatcagagaaggagaactccgccggggacagttctaataagacaccatacccagtggtgctgctgccagtctccaatcaaagaaaccaaaaggtcagctgcacatgtactgtatttcttcttttgaggatttctgagaactcaaatagaaagtcttgactcatgcgagtggtttgagcagtcaaactaacttaaagcatttatagcagttattaccaggaagctctagaaaaagaagtcttaatcacctgttgtaccaattagcctgtacatcacagtaggatagccttgtggcttctctgctgtagcttttctcaatttcaaaatgatataaaagctgaaatgcaacttgctagctatctaggtcagaggtcagatcttcccaaatgggtcaaaaagtaagtcaggtcataatgatcactcatgagtgtctcacttacactgctctgagattcctttgaaaaacatcttatgtaaaaggagaaataagaactttcatggtagtcatgtagacaaaaatcaggagtcggcaggtttaatgataggtatggctcccatttgtacttaaggcaactcaggtccaaggcttcctacaggaatttacctccagggcaaatatgagaaaaaggatacataatttaaaggaatgtatgtcaatgaggtacaatagttatgagggagaatgccatcacaaggagcaataaatcacacaaatattcaggaatggttgctttagagagttttaccacagattaacctagcacgtgtacacaaaagtttaaggagggattaaaatcttgtagttccaaagacatatggatttattaaaattaaatatgtaaagggatttcaacttttctgtgaaagtcttcttcctcttgataaaaatggagtccaagagaatgacagtttcattataagccataaaggaaatggccataacaagacctagccatagtgacgtgtattcccaccagcacaagaaggatctgggagcagttatttctattacaaattagccttactgattttctcagttgtctttttgggaacaatcacatgtatctatttccctagtaatttacacagaattacagcctaatggataagggattagcttggcaggcaaattactggggttcaaatctgcttctataacgtatcagctgagtgaccttagatgactcattttacttctctgtaaacaggaaaaacaggagcctacatctactgatgctcctataaggacagcacagctgccttctggccagttcctggagcacagcctggggctcagtgagtgctcagaagatcctgaaaagaggagaaggttacagttaggctgaaagaagccactgagatgttttacttgtaaaactgtgaaaggggagacgcgcccaccactacaagggttgctgcattgggctgcacctggctggaaatcaacagtgagggttagcaggaggaagcaaatgggaaggtcacagtctgtcagaatgacctaaatagccacgctgggtgatgcagatctatctgtgacagccagtgtggtacaatggaaatctctgaaggtaaagatagcagtcaagagggtggtgtgtggaataggcttagctagagactggacaggtattaggtgacgacctccataacccctgctgagagaccagtgcagcctatgttacagcactctggaatggcaagacgaaagacagttctgaaaaatccctgagaagtgcaagctaaggaaacatcttacgcaaaggccattgaaagcagtaagtgctcagaaacaggaaattaaaaatgggcaatcttattccaggaagggtggtgcccacacctttaatcctagaacttgggaggaaaaggcaggtggatctctctgagttccaggctagcctggtctacaaagtgagttccaggacagccagagctacacatagaaactctgtctcaaaggaaaaacaaacaaacaaacaaacaaaaaacaaaggtaatattgtaaatcacttagaattactattagagttacaatagaaaaatgaataaataatctagtctctcacctcattttacaattttacaagtaaatagacataaagcattgagtaatttgtctaaagattaaaaaacagttaactcccaaagaggtttttcgatacagcactaaacaccccactataaccctgcttagtctccacagtcccaacaccccactatatccagagtcctagatacctcactataacctaggtgtgtctttgcagccccagataccccactatgaccaggtttgtctctgcagtagtagatgccacactgtgaccaggctagagtcctggacaccctctatgacttcccttaggtgcagtatgagatttaacagcacttgattatttcaccaaactgtctcaatcatctttctttattcttatacatctgaaggccctgtctcacttttgttggtcagtggttctcttccattgaacttgaaaaacagggtccttggactaggattgtatttcaatggtagggtgtatgcttaccatgcatatggccaaagaccaaaaaaagcttttttttttccccctgagatggtttcaacacactcccatatttatatatttgtatatactgatcccctatcctgcagatccatgtatcatctatctatctatctatctatctatctatcatctatctatctatcatctatctatctatctatctatctatcatctatctatcatctatctatctatcatctatctatagagctattgtccaaccatagatcatccatcaatctatcatctgtcatctattatctatatctatcatctatatatcaatctattgatctatctatctatctatctatctatctatctatctatctatctctttacatcacagaaaccacactgacactcaggtttcccaatacaatatattattttcttcttttacttctttatgcttcctggttgaaactgaggatcatccaatcagtctaagccaggaattatggagttgcttttgattgttcctttcatacttattactccaaaaaatgcattttgaacacatgactcccctgttatttggctgggacagcatggccccacccttcattgccatcccccagccgtctatgcttcctttctgatggaactcctcaaatcttctcttcctcaatcaattttcagaatacttttcactcatctcctaaaaatacacatgtgatcctgtcctaagctctttcacacctcacttgcagtggccaaaaaatttaactttctgtgtaaatggccaggcagggagtagttcaggcttttagatctcattcagctcagcttccatagtcatccatcacacacaggataactgttgctaggtcccacaaaagttcatttacagatgattaggcatgataaaatatgaactttactcaccccaattattcacacagtataaaaacatctttcatgcatggattatacagaaataaacagcagacccgatgtggcccatgagatttagatgctgaccttggcctaaccagggtgtcatctccaacctcagtgtccatgatgctgcattaggatcctaattcacaatgcccatcatccattgtgttgacagcaagcttagtgtatatcaagagctgccaatcctctcagaaccaccaggctctccacaacagggcctgctatgcttccagtctctttgagaacctttctagtcttagctcctaccttgtttatgttttctcctgtatttatatctttgtatagaccagtcctttaccaagaatatctatcctatcttcttccattgtggatctcttaacatgaacttattacttagacctttaccagacacccccctagacatatcaacttttatcattgtttttagctgcaatgcagagctaggccattctcccttcatcctttttcttcagtagcccttattcccagcattgcattgctgcaacactcaactgtaattccacagaagagctgactcctccagcttagtgtgagcaactgaagggcagaaactgactcttattttcctctctatgcttaagaatgaacaaattacttaaaacctagtaggttttgaataaatgattgtgtaccaagtaaacattatacttaccagctgggtccttcagtgaaggctgattttctatttcccaactttaatgcaatttgaatttaaataaggtcaagtatcataggtggcagatgattctttcagaatgtcccacagatttctactccggtttgaatattttctctgcctatacagatttgactcattatttcaccatcattttgtaagatggctttcatatttactttgaaaatttggctagactgcatcactcaaaatgtctgagagtgaatggcaaaatgcttacttgcaagccgggggcgtgggggtggggtgtggtcctgtacttcagctgacctgcacaataaagaaagatgctgtttcccaggcacaacccggctatactgaatgagtaacgaactgcaagcgcaaaaactcttagagatatgtcagaaatactcggcccaacaggcacggctgtttccagtgtgaaggaagaatgtgtctggttccctggcgttttaattgtcatgttgaaatttatgattgtagtttttttttttatcaaacatgaacgcaaatgaagcataagatgcttataaaaagtactgcactgctttatttctataatgtgggcttacacacttatagaatgtgtggaagtgaagcacagcagaaaaagctttctcagaagccaggcacaaccttttgtcttaagaacaaaggaattagtcaccacgcgtccatgtcagcagtgactgcatcttaatatgctctgctgcaggaactgatcttgtcaaacggtacaaactggtactgtagggaaactctccatagactctgactccagaaattaactccgaacaagacagaattgcaaaggggcaaaagcagcattaatatttatttaccagagctcagtcacaccaagacattaaaagcagtgccgtttctatagcttattagtgcttagcacacaaatggttgattctcaatagaaggctgacagaaagagaaactagcaacattatcatgatgaagctaaagtttaaattttgaggattaaataaccacaggaaccgggttgatagtacgtactcagtgccacagagacaatgcttcaaatggacactaaaagagcagctattattctgcaatattaagcatttttcctcacaaaagtgtttcatctgttggggctttccccagggaccatacatgtctaagtgctttcttttctctcttccctgtagctctctcctctcccactgcttaaatcagaaggtgtcaagccatttggaagattatcataacaaaatgtttttttttttttttttaacaaagtttgatttgaacagaactggaggcatcttagcactaacccaaaactttgggaggttcaccaacctctagaatattttttttctccaaatgcaggctgttcagtagtgctcttctccatctgtcatcagaccgtgcttggaattacattgtcatatttaatgcaaaagggatcagtcccctttcatagctcaaattcaacatagtactgtgattggaaggccagtgttttcctatgttgtaaattaaatcaaaaaccataaacttatatgcaattacagacaaaattccctcccaaaagcttagacactctgagagtggaacaaactcggaggattgatgtaaaacccgaaagctgtcaactctgaagtggtaaactaggtatctacttctccgtagatttttcttgcagtgtatttatgtatgtgcatgtgtacacacacacacacacacacacacacacacacacacacacacacacgtgtgtgtgtgtttctaaatcagcaaactcacaatgcttgcaacctagagtcctattctaatttcaaatgagctatatgctcacttaaatttacaacaatgatgaatgcaccacaatatcttatgataaatatattgcaattcaaaaccttcctgcagtaaacctgcttataataatgatctgaatgcaaacagtctcaacttcatctctaaattttacacctccttaggaaacacattccttatttttgtatcaactccattgcaatctgctcttagcctgtctcttccttttgtctctcactactgacagaatctggttattttcataaatacatttcctcatagtcttcatttcaacatttttattagacatacaattaataggcgaggtggtggtggtgatagaaatatgtcatcttgcttatactgatagagagtcacttaaatatttgagtgctgtagacaaacggttttgtaatataccagtgattccctgccacactcatcattcacgtgtctgggtgttttgcttgccacatacccactttctgtaatgtgcctgaaagctgtgtgtgaattgaatgactaagactaacaactgtttggaagcctgtggcaggaatcagcgggatgcactgggcgctgagtgtgtaatgggattagggcatacctggtgaggtgcagttggcgctcggattcgcccagcagctctgtcacttgcaggcactcctctctggcccgggctgccttctgctgttcttgctccacgtgctgcttgctctcgctcagttctagtctcaatttctctatttccttaggcagatcggaggagaaaaattcatatgaaatacatacatgtgaattcaaaattagtccacttttattccttccctgaatcttaataaaataaaacctcactggaaaatttagacctgcgtcagctccatgacaatgagaaataacacatctaccaatgcacactcacgaagtagctctctggctggggagacaaagtctgatttaaaacgtgaaacaactgaatgtgactactgcaaatgactgataatctactttcatgcaaagagtaatcccaatctaacgggcacctcctttgaaatggatcattgtgtaagagatctcatcagatacaggcaatggtgctgatcaaatatgcaactgtttacttaaaagacacatttatggttttacttggatgtcataaaaaaattacaggttaaaacagttggtttttaggaaaatgtgaagtgttaaaaaggcctttgcaggatgcttaacagtattagtatttgtcagcctgagggccttcagcctgagggtgtgagatgtccgagctagcacctgtgctgacaggccggcagagcgctctgacatgactgagcttggatacatacacatatgaatatgaacatagcttattacttcatttgaggaagaaacttcttatcttactgagactcaaatatttcaaagcaaaaataacttatactgtacatattttggatagtttgtacattaaagtaaaagtattcatcacagaacatctatggcattaagcaaaccaaaggagctggacatagaaaaaaagtagactaaaaaaacacgaacaacaaaaaacagtcaggaatattttcaacttcatacataataagcaagaagcaagtttgctacacaaaatgcaatgtgttttcatatctgaccaggccattttaaacatagtatttatacatactttaaaatgttcttatgccatttctcaatattatgaatgacctccaactatatcccatatattaaataagataaagcaaatgactcatttttcttatatttataatgctatattcagtttataccatcaaattcagtttatgccaacaatacgataaagtcacttgctatgagttctcaaatattattttatttttgaaaatccacatacttatcgatatattactttcatgcacaggaggtttctatatctttcagactgaaataccaaataaaactgatttatttctttaaaatattttaagttattaaaattctactaacatcattgcagtcttacaatgaaatataactaaagatgtaaaacataatagaaaagtcagtaagttttatttgcctagaatctgtgaaattaagagcagggaagtctagagctggagttatatgttggcattaaaagtttaaaacttcactccatgtttcttttacatcatgctatttataaaagcctgtgtttaatatggccaacccagagaatccccatcttttcttgattcaacaggtaacaattcatgcaatggatgagaaaacacacacaaagacaataaaaatacacaatatacaaaaagcaacaaataaattatagagacaatacatgcctcaaaagcatgggcagacagattatcatggacaagaagcttagagacaatgtaaagccataaaaggcccataggtgtgagatggccataggtgtgagatggccataggtgtgagatgggatggcaccactagaggctgaatgtttcttatgaatggtgggagacaatcgcttaaacagatacgcaatttgagaagcttaattttaaaaactggatcaatatgtatgatcaattttaggcagcaaggaatgacagatgggaaaccctgaacagaaagcagcaatattccagacatggtagagagacttaaatctgaaatatatatgagatgtatctggctggggacatatctcagtgagtgaagttttggtggtgcaagcctgaggacctgagtctgggtccctgaagcacactgaaaagccaggttggggtgctgccctacaaccccaaagcttggaggacaaaggattccaggattttgctagtcagagtaatcaacttgacaagtgtcaggtgtagtgtgggaccctgtttcaaataataaggtggagagataaagagaaaaacatctgacattgacccctgacctacacacacacacacacacacacacacacacacacacacacacacacacacacaccagagacagacaaagagataaaaagactaaacatatacattagtgtatttcattaggaggatacagaagagtgacagaaagaaaacaaaattcaaacttccttaaaaatttttcaatttttgtaagcattattcaataacaacacatgcactctgtaccattttaagtttacagcagctgttttcatatcctcacataataaagcagctgcactgaaagtcagtcaaagctacagggaaagaacattcaagagtccacactaatcaaagctcagggctttgcacctctgtgaccttggccaagtcactcaactctcaagacactctcttcaacctaaaatcagtgatgactggacctgcctccaaagagtgtggtgaagaccagaaagcatggggtcaggaaggaataacctggtagaggaagcatggctgtcctcaagcattcctgactgggagctgagggtacagctcaaagtgaagcacccacctagggcatgtgaagccctgggttccggtcccagcactaacctgggttccagtcctagcactaaccagcaacacagcaattgaatccaataaacctcttcctcctctacaaaagcataatcttgacataaacgaattacattttatctattctaatttcaaaatacaaagttcctttttgaacagtggcctgcttctgattgtgtgtgccagcaaaggagctcagtgggacagataatcaaaaccaacaaataatctaccagctggatggaggttcaacacttagctccccgagtcaggaaaacctgccatggcaccaactccaacagttaggagaggaatctcttgccagaaatgccatgttcccactggcagaataaccctgtgcctcacccaactgggtcagggctgcttcctggctgcagattagtggttcagggacgaaagaccaatgacggtcataggccaaatgtacattcctctcaaagtacactattaacctgatgtctgcaatgcagtctgacacagccatcttttggccagctgggtgacaggagagctacatagctttacacttcaccaaaagacacacctcacatcataaccacaagagctggacgcggagctcactggtgcaatacttgcctagcatgcacacaccctgagacactatccatacaaagccataaaataaacacaaggtcatgaatatgatcaccagaatgacaaaacacagaagccgttatgaatggctattttgaacctctggccatataagtcaaaggctgaggagagaacttatcattattattctgctaaatggacataagtagtaaaattactcctagtgattattgatgcacccagagatcagagaatctctcaaacctcattggggaatcttcttgcagcagctgacaattaacacagagacccacaacaagccaatgtgcaaggaagagaccatgcagtgctcatctgtgaatgatacatctggattaagattttcttaatcatatatatatgtatatatgtatatatatatatatatatctttacctttattactgattaaattttcttctcaaaataaccacctaatctcagtcaaacagtattcaatcatttattatcttcaatggcagattaccaactcttctaatatttatcttcatttttaaaaaagatttctttttagtgtatgagtattttacatgcatgtatgtatatgtgccatgtgagtgcctgggtgtttgcagaggtcaacagaagacatctgattccctagaattggagttgcatgttggtgctggcaacggaacttgggtcctctgcaagagcaacaagtgctcttaaccactcagtcatctctatagctcctatatttgtattttaaatggcatacctatattactctctcttggtgtgtaatgtaaggcattagctatcatcttctttgctagagtacatggtggcaggttatctgagaaagcagagacaggaggaccactcgagtggaggagctctgtgacagcctgcacatcactctaaagatccaaatcatgccttcagatacgtttagttgcttgtcagcggctcacttacataataatggaaacttttctctctactgagacaagcattattttttgagttaatttttttcaacaatgttttattatttagggggttaaaagcttagctctggcctaagtgaggcactatatgcttgcttttgagctgggggcagggtcttgctgtgttttggaggctggctcaaacttctgggtgcaagtgatactccctatttgaatcctataaatggcatggctagacgtgtgtgatcaccctggttgcccatttaaaataatttatctaagtaactgacattcctccacaattactcaaaaataattcccaagtagtcacactttcaaatactgaaatatcaaagtaatttttctttacttctgacccttttcatctgtcttgcatcaactctttatgtcttccctagggcagcttaagagttccttgttggtcaggcagggtgttatttgtgtttaatctgtcttctgaggcagagacaggaagatgtctataaatgcaaggctagcctggaatctatagctagttcaaggacagccagggctacctagtgagactctgctcccctcccccaaatagagttcccactgggtccaaagtcactctatgtcaaaggagtttttataagaaaggaagcctcaaatgacaattgagtgtgagtgtgtgtgtgtgtgtgtgtgtgtgtgtgtgtgtgtgtgtttgtgtgtacctgtgccttaaagcactattactttatagataaactcaagagtttgtatatgaaatcctactttgtagttcatattcactcagaatattattataggcctgcaccactactgtctgcagaattataatgctaccactgaagagtctctctaatttctaataactgctctgtaatttgtttttttctcttcctggaaacttttacaatattctttcccattcatgatgcaattttatgagtgtgatctcagagtagattcccacttagctagggtttggattttagttttgggacacggctttgaatggctatatttaatcttttttttccttccttcctttctttttatttttttctgagacagggtttctctgccctgtctgtcctggaacttattttgtagaccaggctggtcttgaactcatagaagtctgcctcctgagtgctgggattaaaggtgtgtgcacaatgcccagttatatttttaaatattttaatgccagacattttgtattttctagattgcccaggcattgatctctggccctactggattggtcatcaaaattacttatattttctaatcagagtctaacatctggaattacttctctttccaagttctccattaaattcaaggaaacaatataacaatttttttttactcccatcagttatttcctgcattcccatatccttttacataaccttcatttttattttttcaggtaaaacaactcatctattagaatgttcaatatcttaaaggttctcttctgtcatcatctgcatcacctcagctttgcccagatttgttagcgggaactttggctactatgatttaactgagtgggtagtctataaatgcaaagaggttcatcttgggtcatggttgccgaggatgggaattcacactggcagctgtgtggaaagggaagtgcaggcacacagtacagagaacacaaacagcaggcagctgtcctttgtacaacttctctcctgcataacaagtctagtccatgcaagaaagacactgatccattctggggcaatgcctctagacccaaatacctccactgatccctaccacccacactgccacatagaaaattagggcttcaaaacaaatgctcttggggacatctttaaaacatagccagattccttttgttttgttttgttctattttcgaccctctaccacaggcagcagatgtaatgatttttagataatacatattattttatcatgtattgttcagcaaatattcactcctaactacgtccccactgacagaaggatgtactaattttccccaacaactctggacttagccatgtgatttcgtttagccaatggtatcataacacatgcagaaatgctttgtctttaccttcatgctatggtgattctccatgagaaaaacattatctagtgttgctgctgctgccctgtcagtctgaaccacagaaagaatacacatggagaaggatggaaaccaaactgtggccagacaaaccctgatccaatgctgtcctgattagccaaacctctgccatccagcacttaccaacaaaagcataggtgattagtgctgcaagtcagtgagctttgtcaagaaaaaaatccttgagtttacactagttattattttggagtttcattttagctttgaaattactccatgaaacacacagagcaggagtctctgtacagagaagaatggaggatcaaaaacacagtgtgagtgtcgagtgcattgaggtttaaaccagtggatctcaaccttcctgatgctgtgatcctttagtacagtttctcatggtgtggtgagccccaaccataaacatattttcattgctacttcgtaactctaatttagctactgttataaattgttatgtaaatatctgatatgctacccctgtgaaagagtccttcatctccaaagggatctcgacctacaggttaagatctgccactttaagtaaaatctgacccattgcctccaaataccataacacaaactatgcagtagctttcaaacatttctaccaagatcaataaaaatcaatttggtatcaattcataaacatatacacagtattttacaatcacgaatagtgtaacagttatctcatcaagaagcctttatcttcacagtgagacacatgtccatgttttctatttcttattcttatcctctttaaagaatttctgttgtcaatttgtaaaactagtttcacaatcctgtaacttaaaaatgatcatgtactatatgtaaatttaattacatagataagaaccaaatagagagtttcattcaaacatttctattgtgtatctctcccaaatttctaagaaaaaatgcaaaatctctttgaaaaactgtataccaccttaaactcaaaggataactttgcctggatagaaaatgaggtgcataggaatataatatctaacagaacttatgagtatcccacaatactcattgacatcatcaaaaaaggcccaactgtcacatgaaagcatctccatacacaaactgactttctgtatgaataaagaaccatctatcccccaaatggtaggaatattatataaattttgagaaggttaggctttttttggggggggggcaacttgacgcatgctgaagacatgtgtgaagaaagaacctcatttaagaaaatccccctacagacttgcctacaggccaatttgattaatgattgatgtaggaaggcccagcccacagtgggtggtgccacccctgcacaggtggtcctgggttgtataagaaagacagctgagcaagccagccacgcagaatgagccagtaagccccattcctccacggtatgtactttatttcctgcttccagattcctgtcttgagtttctgcccgtgactccccctccataatggactagacactacatgctgaaataaaccctttcctctccaagttgcttttgctcatggtgttttattacagcagtagaaagcaaactaaaccagtacaaatgtttgcagtataagagaaaaatgtggcactagacacaaaaataaatatgtgcaaatctatctagactactaaataaggagcaacttaggagatttttcaagagtaagtttgagcaataaaatttccccttcctgaaatgacactccactgtaatgaaacacattgagtttattttagcagaaagctatatttcaatagcacatcttggcaggttggaaggggtcagtaatacttgactatgttaaatgggaagaaattttagctcctgtcatttgtgaagatcttggaacttaccaccacaaatacccagggtctgttgtaactgccaagataacagcttcctgaactctccagcctagctgggtattcagtgacacctgacacttcaacaactactaagtttactgtttcagcaagcaacgatgctgtaggctggagctatgccatccggggcactgtttctctgctttgttttgttcatggctatatcataagatccctgttcacagagttaataaactcaaaacactctggatctttggcagctccttatttcacatggtgttctatctcacatactatactatactatactatactatactatactatactatactatgagacttacagggttgtctgtgaataagcatagctaaaagattaacataggtttttgcttctttgctttatgcttatacagtgaatctccatgttagaacacttaaaacaaaaagggctcaaaacaggtaatagatgggctctactttctggaaagaatttgttaccaatatattcaacattacaatttaataaaaggagaaagcattttatatttaaaatgctaacatataaaattaaatttatatgcatgctttacataaaatatctaaatatagatatatttaaaatatatgtatgttataaattataatacattacatattcatgtatataatacatacaaattgactttatgctatttaatgaaatgatgcctgaaatgttagttttaaaaaatatctaaaaaggaagcctggcatgatggtttatacttataatcccaacatctgggaggtggaggcaggagccaggctaggctatgtagtaagttcaaagccaacctgggccacatgaaatctttggaaaacaaaattaaaacaaaaagaagaaccaagaagatattgtgacctgttttgttcttctaaaagaatggggtcataatccctggacagaaaagcaagaatatggctaagagtagccaatgcaaaggagtcttggatttgtgctttcaggcaaatgaacataatttttaggtagctggtgggatggctagatgaaccaagttaaatcctagagcccacataaaggtaggagaaacttgactccacaatgctgtcttcagacttccaaatgcacacatgcccaaacacacacaccatgtatacacacgtggaacaataacaatgaatgaataaataataaaacagccactttaaattgacttcatatttttaaaaagccacactaaactgaccctagtccttttgaaaacatgttggatctacaataactatggtggaagagaaaaaccttgagttgcttctttgaaaatgatctggcataaaaataggaagttctaacagagactttaactggttaacttacagagaataagacactgaagttctcaatcctaacgggacatacacctctctctcctcttcccaaggctcagggatctgcatggaagaggaggtggtccacatgtcaaggaaacagtattttccagaccctacaggatgcatgcacactgaactccatgattatgacagcatatacaaaacctttaatactcaggctagacaaaatcccagcacagaggaagggaaggaagggggcacaaaaccctaccactagctgggtgatgaagagggaatttttgttaatgatgtgaccaaacaccaggacagatcccattccaagatgagctaggcaacacaaattggatttgatgatgaaggaagaaacttaaagttgggtggaaatgggtaccagggtgaaagatggcagtaatgggagaagttaaaggcaggaactatgttcaaagcatgttgtgtgagagtctcagagatttaatacaaatgctgttccacatatcaggatttctcttttctggagagacaatccatacaagggtcataggtcaagacatcattttacatgattttcacttttattaataaaaacaatcttgtaagtacaaatgttatgaagaaaccgcattactaatgaaaaatcgtctacagtgtggctagaacacttgctttgtgtgtgcaaggccctgggtccattgctatcaccacacaaggaaaagcaaagcaggaaagtagaagggaggagaaatgcagagaaggcagaggaggaaagaggatggaggagacaaagaaaggcgatctaaatgttattcccgattcaggaaagcatgccatagtgtaaggaagagaatcaggtttcaactgctgactttaatcagcatttgaaaacacttatcaacaactgagaaaatcatacaaaacaaaaataaaatgcaacaatttttagtttgggaaagcaaactattaatttactcctttagataattccttcccttaaggaaaaaaaaatacatgcttctgcagacatgggtcagcagttttgggtgcatattgcttgtacagaggaccagagttcagttcccagcatgcatgtctagaggctcacaaccacccataaaattcagcttcagagcatctgatgcccccttctggccaccacaggtccccacactgatgtgacagacacacagacagacagacagaatatacagtataggtgtctcacactatatatacatatttatatatatttcagatatcaactatccatttatacagacatgtatacatgcatatgcactatccatgtaaaacatgcagtgtaattcggtcttctatcctttataattactgaagcataaattgcttatcattttgatgaaaaaacaaactcatgaatacatataatttatatcatttctccttcaaatttacaactaactactaagctacagcaaataaatcactacaatactatcgcttagttcttagaaaatttataggaggagatcctcataaatagtaaaattaaactccaggattcatgatacattaaatctaaccataattttcatactgtatcactctactttggggttaatttatgcctctgtcaaagctattaataccttccaacaaaataattcagttgacaatatgttaaaactgaagattaaaaataagttggtttgtactacccactactaactattgttattaatacagcatccgttaagagtctgacgaaatacagaaaacaaggtaaatgcaaaagcagtgttcatagatgcaagtgtgatggtatttccaggcaatactaagatgttcttactacctattaaaataacaaatttcagctgaaagtattctgtccataaagttgtatctgattttgctataggaaaacttgctctgtaaactttaacatgtaaaatttattaagtttttcagttttgaaaaatacctttattagttatattttcaatgcattcagacttttattctaacatttaaaataattgagagaaagatattattcataattataaagtaaataggattatttacaagtttgttcaaaatttgtaacactttaaatgactatcagcctaacagtcattccatgtggaagttcaatagtcaaatgtagtattttcacaatcatcggtattgctacaacatacaaatacatttttaaaaaccaaacaaacttggtgtaggtataaaactattaattattaaaacaacaatttcctaagaaaactgtacattaagtatggcatcagctattaaacattactctttaaagaattagtttctttatgtataagtagaaaacagaccattctgcaaaactatttgtctcccaacaatgcaatttttattatttttctactatcataaattgatatatgcaatgttacttttgcaggcgttgtctggaagataatcagttaaatattccaatttctgaagtacatataccaggaatctcttgagttacttgatcccctctgtatatttttagggttgtctgaatgaaatactatgttagtcatatattttgaaaagtgtgctcctaccctgaaggtttcatttgtttgtttaataaaggcacaggcacttagaaataaagataggactgtaaacagaaccaggagggagagaaaggggagaatacagatacctaaagatgttattcttcaggcatcacctgagcccagcccatcacttcagagctcgaaacctactcagccaagtccattctactggacagaaacccaggctcccaactctgctaatacgtgttttcctacacatgtggaataacgccaaaccataatgctttcacagtcataagctagtcacagacataagcttcaacagacaataattaatttttaaaagtaacaaaaaccacatcatctgtttctcaacaaaaactttttcttcttttgtgtactctcttcgctaaattcatctgacttaactcaatttacagtctggctcctttagcctttaaactacacctttgtcagacgatgctcagtatatcttcatttaaaaatacattttctcagacataattctgtcaaattcactatttagtacaggttgaggggagggcaaaataaaacaatgaaacctacagcagattatccactcaagactgctcagccttttacttcaaaaggatgattcgttttcataggaaataacattctaacttttcctctaattcgcttcatcaacaaatggaaacactagccctgtggtctgggtgacataacagtacagacaggtgtgcggcctcctcactacaacacaggctctttcctagttgcctttgttgttgggtgccctggttacaggaacatcaatctcagcaatggctttaagcactgaagagagcagaggaggcagcctgacttgagtctcggccctgaagccagcaagcccacacacaggctggtgcctgtgtgctgctggtagggttcaaatacctcaaccacctcaacagaagacctgtgctcaacttacctcctagctgtacgctgctgtgtgctggaccacatgggccttctttcgctgggaaactgggcaatttcatcttattttgttggaaggttttcaccaaaactaatgagatgttcttacgtgacgaggaaacagcaaattttaacaacaaacagtttatttatagacacacaaatgattggagaaaaaaaaatccttctgtactgagacatggtgtacgtgatctcaccttatggggagtttttagaaaaagtgactttagctgtgggttataaaaatatttctgtaaaattccatttggagaacttatgaatttactgtacttggctttaactggaaaaaaaaagtaacccatttttttttctagctaattttaaccagcagccccaaatgtgaagtagatgtttttattaataagtattctcaggcagttctttgaagtcaagcaaagtgcacaggagtgaatggatccactcagcttagggaccacgcatccagccatgagtcctagatactctcgtggctagaaacactcttgtttacatgaccgagctagagaaccagcactgttttctttatttcacactgataaggaaaataaaataggcatacaacagacagaccgaggtagtgatcaggactgggtgctttttcatgaagggaaactaaacagaaagagcaggcctcccagagaatgacctcatcttgtctgaatttccagtttagcccatgtatctaaatactatttatatggaagcttagaatttcagacaagtccacttctaccttcttcctgctctggtaatttctcaacacatatttgtatcttcccaatcctagaacaattcatattttttaattacatgtatgtatttggccatgtgcaggggtgagtgtaggtgcctgtgggggccagagaaagcaccggatgctgaagttacaggaggtgtgaggcattcaacgtgggtgctgggaaccaagctcaggcccttctgtagacgcagtatttgctctcaatagctgaagcatcatctctccagccccacagctcatacttatgaaagcccttccttaggcacccatgcccaacgtcttcattgtttgacatcagcataatctatttcacaggtcaatggtacctcagcatactacatagtgggtagaaaaattttaaaaatgcaggaactatttcttatgtacatattttatatatttgtcagagattaggcagctatcagtgccattcagtttttgttactatggctctgtagtagagttttagaacatacattgcaatactccagcactgttctttccgctctgattgttttagttatttggggtctttggggtctactatgtgagtttcaggatttttttctattaatatttctgtaaaaaatgtggaattctaatgaggatttaatgactttgcagatcaatttaggtaatacagtcattttcacaatattaattctgccaatcttttaaaaaataattttcagtcatgtgtatgtgtgtctatgtgagcatatgtcatgcatgtttcggtgaacatgagatcttctggagttacaggtgggtgtgagcctcccaatgtgtgggggtgttaggaattgaactcaagttctctgaaagagcaatatacactcttaactgctgaggcagcccctgccagggcttgagtatgaaaggtttttccatcctgtagtgtttccttcatcagcttaaattttatatttcatgtggagatctttcacatatttgattattcttattcatgtacgtatacacatacccatatgtataatgtatatctacactacatgtacatatacatatatgtgtgtatatatatgtacatatacatacatactgtgaatgagaatctttttattgatttctttcttggcaagtttattattggcataaaaaagctaccaatttttgaatattggttttgcattctgctactatgctttggttttgcattctgctactatgcttatttagcatgtctaaaattttctgatgaactctttagagtctttatagataagactatgttgtctacaaataaggatgctttgacttcttactttcctgcttttatcccttttgcttttctcttctattgctctagctaagactttgaacattatattgagtaagagtaaacagagatggcattcctgacttactcatcattttagaagaaatgctgttctcagtttttctccatttacagtaatgtaggcttatacatttgtcatgcatggcctttattatgttgaagtatatttttttcttcaggacttccatcatgaacacatgttgaactctgctaaagacatctcctgcatcaattgagagaatcatgtgattctgtcctcaagtctactttggggtctctaaaaaatggtgctggaaaaacaatattcacaggtaaaataatgaaactagatccatatatctcacacagtataaagataagctcaaaataggtaaaagggcataatccaaggtgtgaaactctgaaattgctagaagaaaacagaggtgatatattttaagatacaggcaaggacattctaaaaaggactccaacatcacggaaaaataccaagaattgacaaggatattgcataaaattgaaaggcttctacatagcaaaaggaaaccatcagcagagtgaagagacaacttccagaatgggagaaaactcttaccaactatacgcctggcaggggattaatatctagaatttataaagaaccctgaaaataaaacttaacctgtcaaattacctaatcaataaatgggccaatgaagtaaacagacagaagttcagatgaccaataaacatctgaaaacatgttcaacatctttagccatcagtcaaatgaaaataaatgttttggaattctagcccattatacttagaatggctttcatcatgaaaacaaatgacagcagatgctggtgaggaagtgtgcaaacaggagcacgtatatctgctggtgggaatgggaactcatgcagccattgtggaaagcaattcagaaagcattcctccaaaacgtaaaggtagagctaccaagtgattcagttatcatcattcctgggcatacccctactgtttttaagtcatcaaacgattttatgttggcatcacacaaagatatctgtacattcatatatctattcacagttgtcaagcttgatgtctgtcaatagataaatgatatgagaaacacatatataatggacttggacttacttgcaaagaaaaatgaaattatggcattttcaggaaaattaatagaactgaatatcatcaaatgacaataatccagaatcaaaaggacaaattttgccttgtttcttcctgtatacagaaagtaggtgtctgtctgtctgtctgtctgtctgtctgtctctctctctctctctgtgcgtgcgtgcgtgtgtgtgtgtgtgtgtgtgtgtgtgtgtgtgtgtgtgtgtgtgttcagaagatagtttagatgataggtagaagataggtggatggaaagaaacaagaaaaaagatgagagggaatgaagagaccctttaaaggggattctggggcaagagagaacaacagaatgtggagatcagaaaagcaaaaggggcaggaactatgtaggagagagaaggagcagtaaaattatgaggggaggataggtgagagcagaggggttggtgaataaagacaaatatgtgtgaaagtattacagtgaaatccattccttttttgttttctttttcgagacagggtttctctgtgtaagctttggaaactgtcctggaattcactctgtaaaccaggctggcctcgaactcaggagacccacctgcctctgcctctgagacttctgcctcctgagtgctgggattaaaggcgtgcgccactaccgcacagtgaaatccatttccttactctcccctccaaattttttaaaagataaactaaaaaaaaaaatgaggatttctttgactaaaattatgttgaaggtaagtggcctgattcttaaatgcaaaaatacacatggttttgtttttaaacaacagttaaaaatcctatggacaaaaaggccatatggagatgttaggggccttcagtcacttgtcggtcacaggactgtgccctgtggctctccatgctgtactgtccaaacctttgaagaggacactgctagtatgctgacaaaaatgtgcatgtgacatcaacctgagagagctaatttgatataacattagtaaacaccgtaaattactaagatttattgagcaactgttggcatgcatttatctgtgcaggtcaacagggacggcctctaattttgcgcagagcaggagttgaatctagtctcattctatagagagctacactgaggacaccttacgaactttgtctaagctcactaagtagcacacagaaaaatgagaatctcacatcaggaagcctgctttgggggcgtgaattcatctaaccctatacccgagcctgtatgccaggcactggaccacaggaatgcaccagtgacggtgatctgtaagggcctcagccctcaatagaaaagacagatccatttaaaataaataaataacaccgagttttatgagtgcaaagaaaggaaggaaacaaaggtactgtgagaggatagagacttccgactcaaaaccaaagctagagaaaaaggaagctgatgagaccagggagagagggaaggaagagcatgtaaagaagatgtctgtccaaaggtgatgattggccactggggctccgcgtagaggaagaccttgtctcaaacaaaacaaagcaacacagaagagccaccgttggcttcccttatacacatgtgagaatgggtggatcaaaataccaaacatttcaagcaaatataattacataaaagttctttaaccttttaggtgacatatcaagaactgtgagtgattatttaaaggtcactctttagttcatttatgctgtcaccaatgcatcctttcaaccaactgataattctggctgagtattacaacagataactatgcctgagtactacaaaggataactatggctgagtactacagaaggaagagtgatatggagcctgcttgaagtaatcacagccagttctcacaagtggctccctgctctggggctctgtcttctgccatgtggttacacctccttttttgccatccagacagtagttaactggaactctttgcctagtatcttttgtggactggcttttgctactcacttatttcccgctacactaagctaacctatgacttctatggtaaaatgattttctaaaataacaacttaatacagtatttagaacccacccaaacaaattgttcctagcatatgcaatttggcaaccatccctacaatacatttagagtgccttatcttacccaaagaaactcgatacacattatcagttactctttgcctttggaccccaagcaatcaccacaattcctgtctatatatgtttgaccatctggatgctgcatataaatggaattatacaacatgttatttctcaagactggcttctttcacttagcataatatcttcaaggttaatccatgatgtaaataatttttttctgagactggatcttactatatagccctggatggcctatatattttgctatttagaccaggttggctttgaaaccagagatctgccggcctctgcatcctgagtgcaagtattaaaggtgtatgccaccatgcctgacccagtatttcatttttaaaatgccacaggtaggcagttatacatatctcatgtatccatttgtctggatacatacttagctgtctccagattcaggtactagaaaaatgtgattatgaacattcagatacaagtttgtatataggccatgtttttttactttactaggagtcatatgagaattctatgttggacatttcaagaagctgccagactggtttccggagctgaaccactttacaaacctctaacaaaatatgagggctctgatttctgtacacccttgctgacatgctactattgtctcatttaattattgtatgatgtgtacatttgcatgtaggtgcacacattttagagaacacacctttccttccactatgggttccaggcatgaactcagatcctcaggctcacagtggccatgtgtttctgaccactgagcaaccccaccagtccattactgtcttttaaattagagctatcccttatcagacatgatgtggtagctcatgttagcttggtttacgttcttgtgacaattaatgatgattgcctttccatacaccttttatcattttgttatttcttctaaacaacaaatttctatgcgaatcttttatccaggtttaagtcagcctgcccttttagtgttaaattttaagcattcttcacatattcccagtgtaagatatagccaggaatgaagcctatacctgtaaccccaactcttaggaagctgaaataatcatagtgagttctaggccagcctgggctgtacagcaaggctctgtctcaaaacagtataagacaaagcacaacaagaagaaatgtaagagccataaagacattctgtttctcatggagctcccttggcctcctcgtttgtgacatgtacctcacaataatcattacattaataagtacatacaaatacagcaaatactcacagctcacctgtagcccagtcatctctaaaatgtgggctgagctaagtcatgctcttttggactttaggaatccttctagtcactgttgtttattatttgagattttcgttcaatcacgtacacgtggtcactgaagtaagggacactactaaaaaaaattctttttttgatttttcagtgctagggatggaagcccaggtctcttgcatgttaggcaaaggctctaccactgatctgtatctcaatcccactccattcactttaatgccagggggtcttaaaaggcaacctctgaaaaatcacaagtgatatgaaattatagaggaaagaaaattgtaccaatcacggttttaaaagaccgttactagccaggtagtggtggagcacgtctttaatcccagcacttgagaggcagaggcatgtgaatctctgtgagttaaaggctagcctggtcttagagagttccaggatagccagggctatacacagaaaccctgtctcaaaaaaactaacaacaaattaaacaaaaccccattactgtggtttccctctgaaaagaacactgtgttacactgatggattttggtcatttgccccttctgagtcacaggctgtggggaagtgtaaataatggccaaagcacaattcttgatgtagcatcattagaaggctttcttctaagatcttctcatcttttctttccccctttttcttttttccactatgctgtttgctctttggggtattgaggctagttttaagaggtgttaatttcagtatttgacactttaaactaaaggcttgcccaagggggaaaagaatcatcaaatctcacttcttggttacagattcctgagacatactggaagatataactgcacatagactttcaacgtagctattaaaagatactggatctagtcattagcatgacactattatgatgccaaagcaccacatgtcaagcattaactgcaagtggaggggactttaaagaggtgaggtcccagtaggagatcttcaggtcacaagggcatgaccctgacaggtcatgagaccttggtggtttctccttcccatttactccttcctgacacaaggtgggttattctgctctgtcacacactcccaccacaacgcggtggtctcgatacaaacctacacaagagggccaacgggcagtagatggaaatctcaaaaattaaagtcaactttataagttggctggtccagatgttccttacagtcaaggagagttaactgacttagtggagtgttcctttacgatgaaacatttcagactcttatcctacaaacccttaatggattgaatcactctatacctttgatagccctaaattgcgataaaccctattaaggtgagggaaatattctgaggacctgaaaaatgatcatttcgattgttaaaaacatacttaacatgcttatactctaggtcacctgtttctggaacagtcatacttcatcctggggatacattttgaaggtgccaggaaagaagaaaagatcaccagctgtaaacaccatgcttctcaaataggagtccccagatacatcctctttttcatgagctcacacccatgggaaactctggtcaaggatgtggaatttcctgttttgcagaatctgccagattctccaagttctacctttacagtctactggtgtttagtagtagccttaattaatgatggggtctaattctcaaggagaattaagtgatggctactttgtaattaaattcaactgcttaaaagtctaggcatttgtttccttattaatcatgataaagaaaatctgatctaaaattgatgaggataaaattcttccttataatttcaatagtgtcacttttatgagaatgaataactggaaaatgtggactgatgtttgagactccatataccttctatttattaatacttaattcaaaattaaaagggggagggaatatgttctataaatttagaactagagagaaaattttggtttacttatccaagcttctcatttcacatagaaaagaacatccctacatcactgggatatttgctccttggcaaagccaggagttttgaggcaactatgtggctcagtggtatggtaacatgcatgaggatctggcttcaagaaccagcaccaggaaaaaaaagttctctttggattcatggtacacaggtaaatcctgcataatgtgtgtttcatccttcatcatacgtcactggtaattttccatgtatccagagaacccaattattaatacctaattggaatgttggaaatcttaaattttctggtagacatggtagaaaatgcctgtagtctgttactctggaggccaaggtaggaggatcactaagcctcagagttcaataacagcccaagtgacactgtgaggatcagtctctaagaaggggagagttgactagtagtagagcacttgtctaccttgcatgaggccctgggttccttcccaatatctttttaaaatatggtgtggcagaaaatcatacaaaagaaattcaaaatgaccacaaacacatacttccaccatgtaacattagcagtgtttgactacagggcattcagtgtcagcaattaacctgagctcagcatgtggctggcagacagctataagacagtgctggggacatgctaaccaatgctaggagtcaggagatatagattttctttgactgtgtctcccttctcactcctctgctcaagctgccatgttgggccttctagccaaatgcctttgtctcccatctgtgctgggcagcatcctgaccaccttgcaaggataccgtcatcttctcttccaaatccccaggttcctttgtcgtttgctgttactgacataagaaatgcttttgcatagctaccttaccttttcccttctgacagaaattcattataggccaacacaatgcacaaaacagatggctgttggattagggcagcagcaagtgaagtctaaggcgatggggttctaaatctgtcaaggttttgttttcttcaagatctagcctatcatcttcctttaaatattcatataaatggccacataaaggagattagtgtaaaaagtaagaagtgacacacaaaaaagaggcttaagatatatgaactgaaaagagagaaaacaagattatacctcggaattgtttacaacacacaatatcatagctgtatatgaataaaaagcagaaggtaaaacaacaacaacaaaaaacaaccaatttgctccattgtatgataaggccactggattccattaatgtgcctctgtttgtatggtaaatactgttttaaatgtatacacaggtattaattagtaacactcacgctggatattggtgctaatgtttctcagccattgaagcatggtgtagctgtcctatgtctaatgcctgtcagcttgctggcctgcagggacacattcaaataactgctgccacctgatagcaaccagacttgcaggcttggcaggtacatagacactgtgaaagcccagcaggctagcctggtgagtcaacatttaaaattgacataagtatacagaattcagtttacagttttaaatccccatccaaaaggaaatgtttaataacaaacacttcataaggtgaatcacttctcaatggccaggctttgttttcttttttctgattttatctcttagatagcctttcaattcataccaatactgtttctattgatcatttaattatttaaaaagaactatggtaaacagaatgatcaacttttctggacagttaaattacaagcaaaacccaaccatatgaatatacacatggatatataagtaagtttctgtttaagtccgaggtatacatatcctgtcacccaaaacaaccgggaaagcattagcacatggctgagcactgcaggcacagtgggccttgacccgctatccccacactgacttggagttgcctctctgtgaagacaaagcaaaagcacaggtttacttgcttatggataattttgtgatttttttttaccagcataatgctgacttaaatgaaaaacttatttagcacaatgctgtaggaaaatcagctcagtaaattgagaccttttttaagtatagttacattaaattatctgcataatccagtgaattctcgtttccactggagcattacccaggacaagaacaaaagacagtgctttattagacagacgctaggttgaagaattttctcagaaagctcagttaggctgtgataggaacacaaatttctctaagtatgctgaacaacgcttgagggcatacttagggaagctttattacatcgcacacgtggaaccagattctccctcgtgggctgcagccagcgtgaagttcacactacattaatttgcacttgtcgatatgctgctttgcaaggattcttacggcatgcatgttcaaatgtgtactctgactcttcggctagaatataaactccccaagggcaggatcggggcttgcagcaatttccccctagtgtctggtaagctggtctggctaagccatgcccccaggagctgttgtatggtagaggagaaggaatggcaatgtacaagactacagcactggaagggcgtgaagaagacaggcaagcagcgctgtcatcaccaagaccgcgtgactgtgtgcgccaaagccatgcccatgtggccccctcccaggcactgtgttgaggagaagtgcgatggcaggtggtagctgaataagtctctgaagtctagctctcagacttcacccattatctcgggctgctgaagagagtgtgtagcttcagagagatcagagctgcatgagatttactctaatctgtaggcgctaaagttacaagtagaaaagactaacactgctgctactcactcccagcagctacgatggcctgttgctgggatgctcccagaattagacagtggactccagaggccaataatctaggtcttgaggcacattacactgttactataaaaaaaagaaaataaaactatttcggggaagctcattccatggcctgtaacagacttttccaatcgtttgccagctgctgccgtggtcctgacttccacactaaacactgagatcagataggtgctcagagagaaacagtcccaaccctgaggaccctctacaccatcgggtacaattctcagaccttcctttattctttgtatttctctggtcttaactgggtgtgacttttaggagctgcagtgcttccttggtctctgcaaagccacaccaggcagacagatttccttcaaatatctaatgaactgattttaaacaggaattcctgtgttgacacactccttttcactgagtcacttctaatgtgctgtctcaagactggtacagagctgagcaacttttaaagctttttttctctctctaatttttccaagcaagattttctgatgtttttattttgtgtaggtgactatactctgaagcatttgctttgattacttcacgaaggtacttgcaacattaaatgtttcctactcggtggtaagtgtctctccaaagttctaccacatacagtagggctaagaaaagctacatctgctttcttctgaaaactaaagggcatatatgctaacctattagttaaactgtaaagaaaataataacactgtgtttttactttcatctaagctgcatgccattattaagccatgtgtcctaataaaatgtggacacagacagccatgtactcaacctggtagtgctaacagatgactgagaaaacagagatatggcatatgcacttttctgtaaaacagttgaaaacaagttataatccaaggctgatgttctccagtaaggcatcccagtaagtcagaagaactccctgcccccagagagggctagcaaacacttcctacaagggttagatgataatgataatgtttgggcttggtgggctagaaggtctctgccacaccttctcagctctgctttttcccaaaaagatttatttttatatttttaaactatgtgtatgtaggttccagtagaggtcagagggcaccctggtgctggagcgacaggaagtggtgagctgccatgtgggtgctgggaaattagcacaggatcttaacactgagccccacccagctctgctcttgtaccagaacagggaggaagcagaagcatatgttcctgtgtttttataaaatatcgatcgcttgtaaaaacagcagtgagcagacctagcaggagtctcagttgctaacagatacaaggagtgcggacgtcacatggacacatgacaaacgccatcactgcaaacccctactctgcacaggtgtggcagttcgtggcatgttctcaatgcagtctcacagcactgtttaagaagtcctcgcagctaggtaagatcctgagttgagaatagcctggactacacaacacagcaagtttcagactatccttgccaacatggtgagaccttgtctcacaaaatcaaaaataaaacagggcttggcacttgcaacttatggccccacaatcaatgttttgcaatttttaatgacttttatttgaggattcgtagtttgcccatagtgtaatggacccatggaacatcagttcacctatgtggtctttcccctgttctcagaaagttgttcccctccagtctctgacttgtcccaggctaactactgctggtatccagtttctgtcttgtgccaggctaactattgctggtatccccaccaggatggaaccaggtcctgtaagtgggggaagcttgtggtctgtagctgcctttgcggctagcaggagactaggtgtgaactctgactgctgattttatgtgtgtgtgtgtgtgtgtgtgtgtgtgtgtgtgtgtgtgtgtgtgtggacagcacataaaaatgtaaagtcttttgctcctggatcaggagcaaatacaggtatcccagggtagatgctatggtctcttttgggataaaggagactgactcccatagtacccaatggggcgcagtgcctggaagagaaaacctgagaagcttgggagagatggttcagttgggaaagcacttgctttgtatgatggggacctcaatttgatatccagaacccagaaaaatgagaggcatggtgaacatttgttttgaaatttaaaattccttaatttttttcattcttggtaccattacagaaatttgcaaggcaatatgcttgatgtaacaaggaaaaataggaaggaaaaaaaaaaggacaaagctataacagataaaagacctcaggaatgcacatctaattgacgctacactgcattaataaacagctgcacattttgtgaactgtgctatgacagtcctgaacaagaaggctttcttgtctaagctcagtgatgcttctgcctatggagtaccattccttctgtggctgaattttacagttcctctaatgcatctggggtgactgtcttagagcagcctgctgcttccctgacaactccctgttcttcctctaagaactacacccctttctgctgttggctaaaccttctgccaccagattcacagccatcaccagagggactgcctgagtgtcctccaccaacaataccatgaatccataatttgattgttgtccaccataattttcaaaaccatgcacttcccaccacccacagttacctcgaccaaaacttcctcctcctcataatagccaccatatctcctcctctactgcatccaccaccacggtttccatgtcctggtccactatcaccaccgtctcctctattactatacccagggccactaccatggttgccgccatcacctctaaatgcattgtaccaacctccatgaccacctctgccaccacaggttctacaaaaacccaaaattatctctaccacctctcaagtaccacaaagttgtcagatccacctcctgacctcactctgtgaccagtgaactgcatctcttgtttagaaatggcccttttcttttttctttcttttttttaattgataggtggcattttattggggaaaaaacttacacagaaaacagtaggtgactatcacggcattccagctccaaggatgcagaccctacctccccaatactctccgagacctgagacctgaaggggaccccatttccaatcctctccctttatccggtcatatcctctcacctgtaaccacacccaaaagttgtggtcactgttacaggtacacaggcaaatatatcgctaaattccccttttagtctaaagaaggagatttaggcttgatacaaaactatataaaatgatagcaaatatcaagtacactctaggagaaggaaatgtaaaaacatacacaatttaagacctactgccagtggagcatgttttatgtacatgtgtgctagcctatctccctctccagtcctgatggtgggagtggtttgtatatagaattccattactgactcaaagccaagccatcttgccaccaagtaagagtaagagtaactcagtagacctttatgttctgtgccacagatacaggtggggttggaagcccactagcaagtcagatccctgctcagcagcccgggaatctggcatggagctagagctttgtggcaagagatgtcccttttcgcttcacaactacgtccaatgacagttggtatttctgaacgacagttttatcaactgggtcaaaatcatcaaactttacaaaagcaaatcctctttcttcccaccctacttgacttccagaatttggatggttttaatctcctgtacttttcaaagtagtctctcagattctattctctgtattttctttaatgccatcagcacagacttctttgttaaatgaagtctttacaggctttatagactttatagacccctctctaaaaatgcctctctttagttctaccatatgcccatcaactttgcaccaacttctttaaacacaagagcaagtcataaagccaaagccaattgcatggtttttttttttttaattatttatttttattttacgtgcattggtgttttttgccacgggtgttgggtcccctggaactggaattacagaccgttgttagctgccatgtgggtgctgggaattgaactcaggtcctctggaagagcagtcagtgctcttaaccactgagccatcggtccagcccaccaattgaatgttttgttgagagtctcacatcagcagacagttcgaaaaagcgctccgtttctcaaaatgttctcttaaactatcatctgtagtttcaaagctcagatcaccaataaatagcttcctcgattgttctggtttctttggatcatctccccgccccaattccagcttccgggacaatgggcaaagtcaagctgggggatggggcaacaacagttttagctccattctgagacctgactcactctttcaatcgcagttctatatgggactgagaggaagacatgggggcatttgtaaacccctactagtgaagcagagacaggatgaatcctagagcttgttggagagcaaatataacgtaaccggtgaacttaataccaaagagatgctgtgtctcaaacgaggttgatagcatttccaagaacgacatctaaggttgtactttggctctcacatgaatgtgcatactctctctctctctctctctctctctctgtctgtctgtctctctctctctctctcttccatgcacacacatataaacaaagaaagcttagaagctgttggatcacataggcacccttggttatagggtacctatgaggttctacagctactatgctaatccttgtgctatatacagttccaaattaagtaacacatttaaaataccatgatggggagcaggaagcagaggagtgcaagagcctgaagaacaaagaaaagaaaaagaaaagcttcctattgtagcatctttaacatcatgcttctcttctttgaacaaaaagtcctgtatttttacttgcactagccctgataaaggctagggcctaaaacacacatcttttgagactcaactatcaaattcaaagttgacaaagacgattccccagatgcactgttcatttcaaatcagctaacctggcaattctggggtttcctaacaattcctgaatcttaaaatattgggctctgaaatgatgtagtttgcatttcagagtttctggcccccgtcttgaactggatgaaaatcccatgttggccatgtgctccaatagtggtgtggcagaggacaaccagatattttaggagtacagaacacaagcaaagcctttcatgggaaatttaatagcaaaaaaaaaaaaaaatcaactttgttattatttaagtgttccttttagctccttttaaagatagcaccctagtatttgaatagacaaagacacctgccttacattttggaataaatcaactgcaaaccatttttgagataaagaaatgtgaacattgcttgggagtcacttgctgtattatttggtgtgacaatataacaggaaattttccttcatagatatacagtaaagtatttgtaagtaaaaataataaatataatgcctgatacctgtttgaaatatttctgcaaaaggaggacgggtagaggaagacaatgagaatttgaaaataagatggaaaaatctgacaatgaaggtgaagttaagagaaaaactgaactgggtagaagagggttgatacagtaaatgatgaagccttccaagcgcatggcttgtttataacattcccttcggttcatgtgttattaaattctcacggtgtgtgtgtgtgtgtgtgtgtgtacctgatatttacaaataaataaataacccccaaaaaaattagggcacaaacttccaatctccacaccaaatgccttttgttttccttgtgcagaagcgtcccctgagaccgacagcagttctctgagctagagcaacacaaaggagttgatgggaaggataattcacccatgggtcctgacacaatataaagagaaaagaagaaagtgggcggaagagacagccattgttcctcctctaacctttctttctaattatgccagagtcaaggctcaggtcacaaggaaaatcattttggtggtcaaccatttgccctgttttgtatacatcaaagaggctcttgttctcaccgcattccaatctcacagtttcccacctactttcaaaacccatcaagtggccagattagctaaaatatgaattaaaatgactacattatggggaacacctgtttgcaaaccaagagacaggcctctggttctgacgactgtatgatatataaggctttaaaactaaaatatgctttacatcattgtaggtattgcagataaatgcttgccatggcaagcttttccaagctaaatgtaaatttctctcctgggtgcagatggtggccaagctaaatagctcttcgttcttacagacagaaggtcaggtcatggctgagagaccaaagaacaattgctgctttgctgctccaaatcatccagggaatgagaagctacgactttctgaaactgtgttgcaaagagtacctataagatctcctcacagcctgtcccaggaaaaaaaaaaaaaaacaatagcaagcaaacatctccagactcttccagatttactcctaaacactgtgctcttgcaaaaggcgcatttcaacctacatcaggatcatcagggaaacttgtatttcagacatcagggaacagtgacaaagaaaaatcaatccttgcaactttagcctttgcacatgagaaagaagatattgtgctaaaacacagacactagaaatggttttgaactaggttactcatttccaagtgatattctcctcttgttagtgtaggaatttttaaatcactaaaacatggtaatgtaattttaaatcatcccaaaactctttgcttctgtgttctattggttgaaaatattataattctatagtgctgtataacaactcaaaaaaggtatttaataatgtcacagggtgtgccgacatagctgtaagaacctgtagggcatgagaaagaggaaagcgctccattgatttaggaggccccaggctttcattcctcgatggaagaactttccactccactatcaggtgcgcccccagctggaggaaatgaagtctgcacacattaatacaaagatcttagaagatatagaacacaccataaagtctgcataaagtggtataaaaactacttttattccagttgtctaggtttcaaattagtaccaagggtttcagccatgatttgaaatttttttgcacaaaacttcattagcactttcttatttaatactttccccaattgcctttatgtcatttgtcatcaacagctgatgggttgaaagggaaagtatgttgaaaatatgatagagagccttgatcagaaatatgttgcaaaattatctagagcaacttacttctaaattgtaagggtatctctaaattattgatactgatacctcagtcttattattttaatagaatacacaatctgcttttcttggctataaggaatgcaaaccttcaatggcctataatataacataaaaatagaacagccagagtcaatctgccataactttctctttacaagctttcccaagagtcaattaaaattggagtatctatacaccctcagcagagctctaacataaaacatctgttcaagctgaaactgaagcaagtagcagtttccctaacatttctaatttcactgtatttaggcttcctgagcaaacgtattcatggccatctagttaaaactggttccattctgccaacaatcaatttgattgacatatttacatatcaactcatctcatcttacaaattttaaagtttttcatttaaaattggatgcaagttggcatctttcaagaactttctgtacgtatattttaggttcaaactgtgcattagaacattttttcaacttttctaagtaatagatatatatccaaatgtatatttatgaactgtcaaattggaatttcatatgcaagcagtggtattctcaccacttcatgtcaggcaactgtaatgaaattcttttaatagtataaagtgggcccttacattagcgagaaacaatataagacaaataaagagcctagggataagaccccaccaacgtcagaaagtaacatgtcactaatagcttcagagctgtgcttgtgtctttccttacctgatctttcatttcaagatccttttgagattttgctttgtattctctgtgctccttttctgcctcctccttctccattttcgttttattcagctgaaatcgcatttctccacacacctgttagagtgtaaaaacagatcgatagcctctggaatggcagagcaatgtcgacaattagatcttttggtgccccctagaggacacacagatgaagtacaacaagacttttctaagaccattgaatgtggtttaagattggaaggcaataataaggcaataatacaaggaattactgagtttaacgttccaaattacaacaatgaaattttaagccagtgatatgtaccagcaagtaatgacacttgccaccaagcttgattacttgagttcaatctagtcctacgtggaagtagagaacaaattcctttccttcaaattgttttctgacttcgagtggcatagtacagtgtgggtatgaacgaacgaacacacacacacacacacacacacacacacagacacacacacacacacacacacacacacacacacacctctccctttcgtgcaagcatgcacgcacacagacatacacacatccccctctctcaaactatcaaaacaataaaataatgaaatgcattattttcaggattatttcatatggaataatttcagatggctggacatagtagtgcacacctttaatcccagtacttgggaggcagaggcatgtggatctctgggagttcgaggccagcctgatcttaaaaagcaagttccaagacagccagagctgttacacagagaaacccagtcttgaaaaacaaaaaataaacaaattttttaaaaagcagaaaattttaaagaaatattactaataaaaggtactaccatctaaaattatactaaacttagtaattaaaagttaaagtatgggggctggagagatgcctcaggggttaagagcactgactgctcttccagaggttttgagttcaattcccagcaaccacatgatggctcacaacacatctgtaatgtgatctggtgccctcttctggcacgcactgtatacatgataaataaataaataaataaatactgtttttagaaaaagttaaagtatgtcattattcacacatacggtcaaacattctcgctatattataaaatatttctttttgtttgttttcttttgttttaagacaggatttctgtgtgtagccctggctgtcctagaacttgctatgtagaccaggctggccttgaactctcatagatttgcctgcctctgcctcctgaatgctgggattaaaggcatgtaccatcacccctggctatgtaattatttccttaaagacttcatcagttaagcttttaaggaaaattatatgaatttttctttgataataaactatattattgatatttagatatacaataccagaacttacagtaaacattacagatagcatcaatcttattgtcatagggacacaatatgacttaaagactatagaataacttccaataaaagtcatatattggctttaagcatgaagcatgctctacaattataactgtagccttctatataagaggaaaacatacattcaaatgaagcaactatgatatgttagctaattaatacatataacagctttaaatgttgcaaaacatgatgcaattggttttttcctctaacccaggtcactgcacatagagaaacatatttgagaaatagaattatcagaaaagtctaagtaaagaaatgatgagcctttgctgtgacagggaatccagagaaagcagagttacaactctttctgaggtcctaatgcagtcttaatgacagcatgttatctaatggttattttttttttgtatttttttttattagttcaaattaggaacaagcttgcttcacaagtcaatccctcctcccctcccctcctctccccccaatctcccacctgccccccaccccatccaccctccactccccaggctgggtaggggttccccaaagtccaccacatcatcctgggccgggcctaggccctcccccatgtgtccaggccgagatgtgggatgggctttcaaagttccttcttacaccagggaaaaaatactaatccactaccagaggccccctagagtgcagaggcctcctcattgacatccatgttcaggggtctggctcagtcccgtactggcctcccagatggaggtctggggtcgatgagctcccccttgtacaggccagctgtttctgtgggtttcaccagcctggtaccgacccctttgatcttcattcctcccttctgcaactaagttccagagttcagttcagtgtatatctgtgggtgtctgcctctgcttccatcagccactggataagggctcttggtaggggtcagaggccagcggaggactaatggttatttctgcctgcaaattttcaatttggcatgtcttcaaaaatgatggttttgaaagctttagaaattagtctcatcattcttgaaatattaaaatatagtaaagtatgaaatctatatgccttcctctgctcagctaaaaagctctttagaaacaataggcactagaacaagatggaagtgtagccagaagtcagaaagcataacaagaaagaattttttcttccattcaaaaaaataagctgagccaggtgcggtggtgaatgcctttaatcccagcactcaagagtcaggtggatctctgtgagttcgaggccaatctgttctacaaagtgagttccaggactgccaggactgttatacagagaaaccctgtcttgatatatcctcccagaaagaacaacaacaaaaaaagaaaaaaaaagaaaaagagaaagaaagaaagaaaagaaaaaaattctaaactgaaaatactaaataaaattgaagcattaaagaaaaatgtctcctcgattccaaactgtttggcttaagtaggcctaggaattaagtgacaaattctcaagtctctaacagaaaataacagttcctcagctgcgactggcaatgacatttatctaagtgtactgtataacaaatgtctgagtctagtcttctaaaagtcactccattctttaatttgaactcttgcttccttagttctttcagctcattgcttactatattcatccacaacacttgaacgtcttctacaataagtcaaggccttacactgagccagaatcatcatctcagggttggaaactatttcaccctccgaagtttgagtcctttgaacagttgcagagccaagaacttgttcactacaatatgatgcttcataaaaaggtatctcctgtaacgaaccacaaaccagtaccatgattttccctgcaaaccggcacgcccattccttggcagacctcactgccacccctatctccagacagacacagaaggtatgttagcaaatgggagcttcttaaatctcttcatcatcaaccatgaattttaggaagtgagtggagaattaaaaagtgaaaagagaaatagctctttttgttaagatgtatgtatatgtataatgtaaaagctaaaataattttgattatttaattataaagcaacaatggaatacaatgtatcaaaattcaagaatataggttatcatgttatagaattatctgtgaatttagtggtaaagaattatttcatctgcatattacatatgccaatattcttattagttaagtgatttacttgacacccagataaactagcattcttttttaaatcatttattcttattttacgtacattggtgttttgcttctatgtatgtttgtgtgagggtgtcagatcttggagttacggacagttgtgagctgccatgtgggttctagcaattgaatctgggtcctttggaagagcagtcagtgctcttaaccactgagccatctctctagcccctaaactaacattcttaagtcagttaaaaccattaaacgttttagttctcacttgactggctagtgaggcccagagcacaaatgctacagtattttaatgtataacttaagtatcaataaaataagaattcatgctaaatttaagatttaactaagaatttaatctaatccattggttttagaagcagatctgaaaaaaagaaatgagaggaagaaacttcttatatcaagcacatattttatcaagtcttcaacagttgctgggaagaccaacctcacactgtttgcagaaaaacaatcactcctggcttaactaactcagaaaagttagctttcttaaggattcaacaatataaaagcaatataactcctattcacaagtctgtctttgccaattatttggtacaaattatctttggattttcccaaccacagagtggtgcttgtagtagtaatgtttgttgatagactcattaagttgacctttattattctggaaataatgaaacttttctattccatacttcttcctgaccacaccaggagctttggatattaagaacaacggtttcaaggtggatgagatggctcagatggtatctgaaaagcagagggacagcccacagtggagagaaacccgactctgactccagagtagcaccatggcatgcgtgccctcccctccccccgtcacacacacaaaaagaatgcatttgaataaaaataattctaagaaaatatgtacttaagcaactaactattaaaccaagacttgttcagacctttctgacatccacttcttgagaagcaagctggttctgaatttcttctagttgattgacagctgaaatcttttcccttgtaacagtttctacctgggcctccagcttggcaatattctgagacaggatcaacatctgaatgaggaaacataaattcggcagtgacatttgaaaatgagaatagtaaaaggcattttaatggttcggtgtctgcacagctactgggatctacatcttttctccgcgggctagataatgtctgcttctctacttactcaactcagctcatcacctgaaatacctccttcactcctattcactctctggactctaacttgttgtgaagcggtgtacgattgtagagtctaaaggctggttgaaaccccgagacagcaaatgtgacatggtatggaacagactgagatggagacatttcaaatggggacaggaggaaccaggcaactcctaggtcctttcccacatggacattaaacattagaaaggataatttaaagagatgagatggagatagagaggagattcccttcccccaaatcagcacaggggttccctgcagttcctctgttggcaagcagcacttatcctcagtgttcctcagtcctgtcaaaaaccagatgagcaactatctcctgtcttccaggaagccctcctcaatttccagatcccagcacagaacaggcatcgttcacacctcagagctgccaatcagctgctgtgcatggggacactcacccctgctctctgtactgcttccatgctccctgtcactacccatgccgtcctggctgctgaacattcagggagctacaacatcatgtaatcctacacaacctcagtgcgtacgcctcaccaccctccacatctgtaaaccactgtcatgatactcaatcacactgtttcatagtttttagctgcctggttctgtttctttgtttaaccagaagtccctcaagggcaggctcattaaaaggcactaaatgtcccaggagtatatggataaaaattaggacgattcttttctgagggaatctgtatgtagtatcaggtcttactcttctcttctcaggactgaaaaataaatgcttaattgtccttagacttcacagttgtgctctgttccagtgattccaactcttctgtgttaacttcttagctggactgacacatttaaaatgaaggaatgctaccctaacccagaaaaagcatactgggatatctatttaatctgctcaagaaacaatgatgcttgaattctactgcagtctcggacatttgtacattgttctataattgaaataaatagctaaaatttcttcacataaataagcctataagaggtgagagagatggctgagtggttaagagtactactggctgttcttccagaggacctgggttcagttcccaatacccacatagacgttcacatctgtcactccagttcctgggcttctgacactctcacaaatatacatgcaggcaaaacaacaatgggcacaaatcaaaatcaaaatcccaaaccaacaaaaccaagtaagcctaattaaactcattggttcatacattcaaaaagcaaacagaagggcagtgggacaggagattatatagaatgcagatagatgggaggatgaaaatgatcaaaacatatgcatgcatgaaaacagccagaggaaacacattattgtatataattaatatatggtaataaaaactctcatatcaacgttgaacaaaagttttgtaaagagcttcacagcaaggaaacgaagtcaggtgttggcatttgattacataaatagcatacttgacgaaaatgcaaacactgagtcctatagatagatacattgcaatttagaaagatcaacatttctgaaaatcaaggggaactgtacagttgatatacaattatatacatgtcccaaacattaagagattatccaaaaacttaatttgcacatagcttcactagtatcaaagtatctttgtgcactttacagtctgaaccaatagttaaaggtcaaaagaaaataaacagagcaaattgagtatcaatttaatttccttaatttaagagctcaaattcatgactatccatatcataaacctgtaattataggtcttctggagccatataacagcagcaaattttagtgacaagctattcaaaccaatacattacatatttaagtagagataaatctgactattatattaagaatgctttttgtttcaagtcaatatacagatatttattttgataattataatgttgtatcagtttccattacaaggcatataccaaatccctccccttccttgggactccctccctctaccaccatcatttagttcctctgcccactgcctgtctgctacctcctgtcacccacttcctgaggcttcccctcctgttgtcacaccttctcccccacgcccaccatctggaagtcagcattacacggcaggagctcctccatccacatctgttgcagagccagaagtaacacagacagctgcgaccctgctggatgtccaaggcactgacatcaggtaagtcctttaaactttgacaggggcaaggaagagacaaggacacctcggttgggaaagcttgatagaaatttgtgcaaagtggtttccagtacattggatattgcatgaaatggtagaagagattcaggaaattaaggattctagaaattaaggattctggcaatgggcgattgtcaagggaactgactaagaaaatctgcgggctgtagggggtgaccaagcaagcatatgatggatgatggactgaactaacaagccagagcagttcagagcagacaaggacctttcccgaaagcaagagacaaactcacagcatgaactactcacggggctgggggatgggcaggtaggcagaggcacctgtccgcctagagcttcccacaccaatggaggtggggggagaaggggcgatgactaagtctaagtctcttgagtgtctgactagtaagaaccaggagcacctgtttttgtactaactttatcaacctaattcttacagcataatgattaattggtcactttccctattagactgtattccaaagcttgggtgtgtgggggagggggaggagtatgtaaatacatgtatgcacattcatgctgaggtcagagtcagcccccctgtcttcattcactacctggactcacagattcagctcccctggctggccaccgagccccagggatgctttgtctccaactccccagcactgaggtttcagcacacacagccacatgcagctttatctcctgggtgctgggatccaaactcaggtcctcaagctcctgcagggagcactttaccaactcagtgactccccagcaccagggagcagtttggaaagcaatgttctttctgattccacggctacagttggatcaactgacaatccctcctttctgtttatctatgcacacacttacacacagattatactctttaaaaatataacaagcaaacgcccttctccttttgttccagtaaatacctcattcaatattttgtgttggcaagcttttgtcctgggcatgtatttcagatctgcttgtgaaactgaaggatctagaacaaaagagtgaaactgcaaggtctcggggaggcagtgggggggggggtcgagattgggaggcggaggcaaggacaaagtcaggagaggcaacgttgcatgcttgctagctcttagcgaatgtgtgcactgtgagtaagatcacggtaccatggtacccaaagacctcaacataaatccagtcacactgaacctcttagaagagaaagtgggaagtacccttgaatgaactggtataggagaccacttcctgaacataacaccagtagcaccgacactgagtcgacaataaatgggacctcctgaaactgagaagcttctgtaagtcgaaggacacagtcagcaagacaaaatggcagcccacagactgggaaaagatattcaccaaccctacatctgacagagggctgatctccaaaatttacaatgaactcaagaagctagtctccaaaacaccaaacaatccaattaaaaagtggggtacagaactaaatagacaattctcaatagaggaatctaaaatgtctgaaagacacttaagaaagtgctcaaaatctttagccatcagggaaatgcaactcaaaacaactctgagatatcatcttacaccagccagaagggctaaaatcaaaaacaccaatgatagcctatgctggagaggatgtggagaaagaggaacactcccctccattgctggtgggagtgcaaacttgtgtggccactttggaaatcagtatggcagttgctcaggaaaataggaaccattctacctcaagatccagcaattcctctcttgggcatatacccaaagaatgcacattcacacaacaaggacatatgttcaactatgttcatagcagcattgtttgtaatagccagaacctggaagcaacctagatgcccctcaaccaaagaatggatgaagatgtggtacatttacacaacggagtactactcagcggaaaaaaaacaatggaatcttgaaatttgaaggcaaatggatggaactggaagaaaacatcctgagtgaaggaactcaaccaaagaaagacaaacaggagccttcatctagtagctgactgaagcagaaataggcacccacagctaaacactgagccatactcctggaatccagttgcagagagggaggagggatgagcaaaggagccaagactgtgttggagaaactgcagaaacagttgacctgacctaatgagagcatggagaccctagttgtaaagctggggaaccagcactggacggaaccaagccctctgaatgtgggtgccagctaggaggccagggcagtttaagggacttctaagagtgggagccagtgtttatccctagagcacaaatggactttgggaactcattccctatggagggatactattgcagccctgatgcgggaaagagggcctaggccctcccccagtgatgtgaaggactttgatggtcccccatgggaggaaatcactatccttggggagtgggtgggggtgagttgggggttcagtggggagcatgggaggataagagggggagggaatggggggcttgatatataaaataaagagtgcttcttacaaaaatcacagtacccatgtctgaggcctgtgcattccaaccactgtagctgcttatgcagaaactccagccgtatgggaaactaggtacttccctaggggtgcacatgtgtgtgcacttaggtcgctttagagaaagaattgtaccagatttatattaatacaaattgaattagttggattaatttttagttctcctgaaatgagattaagaaaactaagctacttgcccaagttcattcaagataatacgtaaaaggtccagctagagcttgtattcaagcctgtcaatactaatacacaggtccagcaagtccactgctcattctaaaatataagtgacaggcacaggtgcaatttattcaatgcccacagtagacaggaattaggacattttcaaagtatcatcacatttaatcccatcaagtgcttgaatggctcatcacccccaaagattagagaaagtcccagagagatcaaactggactcactcccccatctttttcctctgaagccattctccctgatgagaccaccacctggctgctgggactagttgtccttactcttacacttgtactcgcacctgagatcaaatgtctgcagggcttactccatttgtgaccctgtgcagcgtggcagctgccacctttactcaggaagtgcccaccagggagagattcctgtacaaatgtacctggcatgctgccaagcacagttcattgtgccccctttttttccttccttttcgaaatcctcacccaagtgtttttatattgtgaagctactgagtcaaatggtttccactaaaccagcccctttccaaataaaagttccctaggtgtgagcaatagcctttgtgtgtggttgattctattttctctcacatatacacatacacacaacagccaattcaaaactacagctcctccatgccttcatcgggttgaacagaggccacttccttcctcagtagttaggattttaaatcccacctattcacctattatttggagctcagccaaacacctttcctgaatcgccatgatcacttgcagacagcaatcagttctgactctgccttagccctgtctttccgatgccacagggccttctttctcttccatgttattcacatttcattcaaaaatatatatttaagcattgctaagcaatgaggatgtcaggtcatatatacagggactcacagaaaggtagagaaggcaacaatcccacaagaatttgtaatcaactgtgggaacacacagagtagatcctagtttggctttgggaggctctgatggaggctgtttcaagaactatgaaggagcaaacagaacaaagaaagactcttttggacaagtgtaatgataagtcactcaaaatcttgaataaaaacaaatagtcgggtggtggtgacacatgacattaatcccagcacttgggaggtggaggcaggtggatctctgagttcatggctgcctggtctcaagtgtaagttccagaacagccaaggctatacagcacaaacaaagaaacaaaagccacaaaacaagcacaaacaaaaaaccaaaacaacaaaacaaacaaacagggcagactggctgtctgaatgactggagcagtacaaggaggccagagtggtagggacacaaggaagaaaatgaagggagaggagaaacgatgcagagactttaggttttgctaaagggtcctagtttatctgaggcagcagagagacaagaaaggcctaaagcaagacactggtgcactcagatgttcaccacagaaaaatcatcccagctgtggtttaaagaacaagtgagttgaggttggtggcaaagacaccacagggctggaagtgccatctgacggtgaggaaacagtgacacagagtagagagaaggcgggtttctctaactcatggaggtaatgctgggtgtgtgtgtgtgtgtgtgtgtgtgaggggggcagccaagggtgatcagatccctgtttgggaccacctgatgaactgtttctactggggcaaggagaaaaaagaaaggagtttcccttgggcactgattctttcaaagctactgtagaaacttatttaaatctctgtccactaaagaactcgagactcaaaggttgaggtagaatcctgcttcccagagagggtgaatagcaagcagctcacctagctcacctccttgtgcctcccaagacgtcttcgtgcgtgcgtgttcttgccgctccttataaacgcttctccacctggctcctccctacaacttcctgtcggctagttgctgacccagccccaggaccccaggtgagttttctttaatcaaacatatctttgcatcattaaacagatgttccagaacataaacaaaagtaacacaccttaaaataatactctgcaacagaccaagatgctattactgcccccagatgccataactaacccccagtgatctcctggatacaagatgtcacccccccacatacacacacacacacacacatgccaaacctaaccccaacctgattctcttggcacatgctctagttctactccaatttagtaataaggtgattttcctcaaatattcatgtcattacaacattgtccattctaatgccattcagtggcttaatgtcacatttggatgaaatttctaatacgtagattttaaaagcatgggtgattcattccctgtctgcttctccacacttccccctccactgttctatccctctgctccaccgccatggtcggcagctgcagacccgaccatgcacagacctttggctcctgtgggtgtgtgctttccctgggcttgacactcttcccccgaactcaatgcttcacccgactctcccttcacaatcctcctgataaaaagtctctcatgagcgtctagcttgagaggtgttgtcatttatgaacagatttgcttagcagccacgtttcccttaagtctgtagttatgggacagcagcattggtcctgtgactacatccccagggcctccagttcatctgccgcaggggaaggagaggtagaaagggatgcacaggaggactgcagaaaccgttagctgcagcagagctgggtgaggactcaggtgtgcacacccccacggccagtagctctgtacggccttcccctccagacggcctgaaactgagccaaagccagtcctaccccttatcactctccccctcaggttcctgcccactaacgaccacgggaaatgtcgagccagtacctttgactctgcatcttccctctccttggttacttctttctttatcatctccttctccaaagcccgtttctcttgctgagcagcaagctccttttccagtctttctgtctgcctgtccagctcactcttcagctgctcacactggatcaaagcctgccacaggagacaatgagaagagacttcaggagtggggagcacagcagggagaaatcacacgggtacaggctctcttctttaagaccgttaaacccactcactcatccagcccgcttggatgactgttggtcagcaccactgactgtcacagcagcatcccaatgtcacacttgctcacagatttccatttcacagttgaggctacaagacgtgtctggttagccaaaacaaacacaatcctgatttttaaagttctccagtggagtgagtccccagctaaatcctagcggaaggcctcaggaagaaaatttacaattagattgtaaaagaaaatgaaaaagtatatttttttataacagaatcccttggagcctgaagtactgggcaatacagaattctgtgcttcaaaatacaatcgtgttggtgaaaattactttccattaatctagtaaaaacaagcaaacctggaactttcactgttataatgaatactattggtatgagtaaatagaaccaatggagccagagaaatttccacctgaatgacttcagcgtcaatgtctttaagtagaaggcgagtaagagcagctgagaaagcagcccaaccgcacaggggagtgcaagagtccagtcagcagatcaggaaatggttctcgggcacagaggccagactgtaggctgcctcagtgcaatgcacaaagtgaagccctaagtcagccctaacagcaaaccctgctgaccactgctgtgtgggtggcctcccaccttctgccggcccacctgcaagaatatggtaggtaggaggggagcactgagttaaaccttaggttacaaactggttatggctgggtgttggtggcacacgcctttaatcccagcactcaggaggcagaggcagcagatctctgtgagttcaaggccagcctggtctacagagcgagttccaggacagtctccaaaacaatacagagaaaccctgtctcaaaaaaaacaaaacaaaaacaaaaccccaaaccaaacttgttatgacatcactacgtatgtaatcaatgatcattttatttacttttcatttttttttgacatttatacctggttacaatgaaaaaaagtagttaaggtttagtaacacttggaaataaatttggtcgtgtgtatgtgtgtacatacatgtgtgtagtgaatatatacatatatgtgtgaatatggaagccagcgtcctccacgaccgcttctctaccttaatttttgagacagggtctcccactgaacctgcagctcaccaattagactgatggctatcatgctccagagatcccatccccccactgctgcacccccaggattgatagtacaagtgcatacggcctcatctcgcttttgatccggctgttgggatccaaactcaggtcttaatgcttgaatagaaatcactttaccctctgggcctaaaccagggagtttggaacccctgagatctaaggctatctctcttacactgtacctcacctgaagctgaggggttcctagcctgatatttacagactattgcaggatgctattccttataattcaagggttacatttattaattttccagaaccccagctgacatctaaccatgagggaaactaaattctcaaaggcaaggtcacaactaagatgacgatgaccaagtagggcctgcgctccgtttttcctgggggagctggtgtggtggcctctccttctccttccttggtggaaatggctaccagctatgaggattggaggaactgtgcttttcccagccagtgaatgcaaatcaagttcttcctttgctgtccctaccaacattttatttatttatttatttatttatttatttatttatttatttatttaggtttttcgagacagggtttctctgtggctttggaggctgtcctggaactagctcttctagaccagcctggtttcgaactcacagagatccacctgcctctgcctctcgagtgctgggattaaaggcatgtgctaccaccacctggcaaaagattgcgcttccctaccaacatttatttcaaaacataatttattatatttagtatttctaaatctagttttattaagccaaatgtaaatactgctatcctaaaggaatcaatcaatttccacaacaaaactgacatctgtccactaaagttttaaaatagaaaacctatttaatgacatctctaatttcccttctcaactgtgatggatagtttcctagaaatcccagtaaaaaaactcatgaataataaattaaggtattatgaggatttactatttactattattgaacataaaatttgaaacttacgaatgtgaatttattttttgtggaaaagcccattaaataagaatgattatcaacatatgtgtcttacttatgaataaaaaaaggtattgcctgtaatttataaatacttgtttaccagaaatgtgtcaataagtctatattgagactatctgcacaggcgtgcatcagcgaccatgttctgagaaatgcatcattatgtaatttcaaacttacataggcctagatgttatcggtcatgtgactgcctctgaaacaatcaagaaacactaaatatgaagtggatggggctgctgctggtgtaatactacactgtttcacagtgagctcgtatgtattatgtatgcatgtattatgtatacatgtgggatacattctaaaataataagtagagcaaatatgtaagccaataacagagctgctttttattactgaggcttacataccacacattgctgcatatgccacattgtaatgcaacagtaagcttgcctgtcccaggaccaccacacacacacctgttaacactaccatttgagtagctgataggaattccatcacctctcttaggatcttctgtggcgatatattgtttatgatctaataaagcaactgaaggtcagagtgcaaagcagccacactagtcagccacagaaactgggcagtggtggccacacctctaatctcaggtgaaagaggcagatggatctccgtgagttcaagggcacccaggactacatgagggtgaatccgtcttaaagagtaacagagctcatccctttaatcccagcactagaaaggtatataaggaaggtctcatgagagatttagtttctgtcacaggaagacaggatttccatttcaggaaaagtctcatgagagatttagcttctgtcacgggagacaggatttccatttcaaccttcgcagagctaagagccactggctggttactttgcttctcggtctttcagcttgaacctcaatatctgtttatgggtttttattatttgtgttacaatcttctggggccactgtcctttttgtgtttttcttgttttgcagcagacaatgtgatgcaaggagcattacttccatgcctttgattggagtccaatgctcaatgcttttctgataattttttttccactccaagtttaacaggctttttcttttgggcaaccaaccagctcccaaatcaagacacagagacttattaattttgaatgttcagcctagcttaagctagtttctggctagctcttttatcttaaattaacctgtttttctttaccttttgcctcgggggttattacttttctttctctctgtatgtcttactttcctacagtctctatttcttgttggctggtatctcgtcattttcttttcctcctccttctcttgagcctagctttctcctcctatttattctcgctgcctgacagcccagcctatcctttctcctgcctgcctagctattggccattcagctttttattaaaccaatcaggtaccttaggcagacaaggtgaaacagatgcaacacatcattacataagcaaatgcagcagaaacaaatgtaacacgcctttgcctggttaaacaaatactccacaatatccaagtctcttattcctgcttttttgattctaccacaatccaagacacagaataatagagacatttttaaaagaacaaacagtcaggcgttggtggcacacgcctttaatcccagcacttgtgaggcagaggcaggtggatctctgtgagttcgagaccagcctggtctacagagctagtttcaggacagcctccacagttacacagagaaaccctgtctcaaaaaacaaacacttatttaaccttttaaccttttatattgccaattttaaagaaaatcttccatagagtgttctctcatttgtgatgtgctcatcccattttcctaagcctaaccctccatacatcactcagcattccctcctacgacaggcaggcaggtggaaggagtgtgaacttttgccagctgtttcttggagttttaccaacacagtactacaaacactctgccattctttttttctttaaaaattatctccggttgtaataatttacacagccttccactgaacacttgctatgcattaaaatctctctaagtggctagtatagagtcatttcattaaccccattaacaaattttaagtggttcttatcattcaggtaaaacaacaacaaaaaacaaaacaaacaaacaaataaaaaccagggccgtgaaacatgaattaatttgcccaaatcacagatttggtggaacagtagaaatttgatggacagcaatttcacaccatcacctgaaaatgacattgtggtcatatcagatatttgttttcttaaaaacagttactacgattgtaaacaatgcaataaagcaatgccttttacctggcatgcaatacaaacaatgtccactagatggcaataaacaccaagaaactaagaaacacagaactactttggattaaaaagtaattctaaattgaaaatatccatacttactatcttttaattccctaccccccaaagaaaagttcatatgtctcatcagaacttaaggtaaaaactagactttcatcacgtcacgtcaaccacgtgacaaccagcctttgccttctttcccgtgaatgcggtgaaaatcctggattcacagtatgcaacgcctcttccattccttatttattcttctcttatacaatacatcccaaccacagtttgtttcccctccctctacgctctcaccccacccccaatgctctgcactctttctatttccctccagaaaggagcaggccttccagggatatccaccaaatgtggcataataagttacaataagactaggcacaaaccctcatatcaaggctgggaaagataaccaagtaggaggaaaaaggtcccaagagcccgcaagagtcagagacacccacactcccactgtaggagttccacaaaaacaccaagctaacagccataacatatatgcagaggacctagagcaaacccatgatggctccaaaattgacacttcagcctctatgagcccctgtgagccctgcttagttgattctgtgggccatgttctcctggtgtacttgatgctcctggctcttacaatttttcctcccctgcttctatagggtttcccaagctccaaggggagggatctgatgaagatttccaatctgggctctctccctgtgtcatgtttggctgtgggtctctgcatctgctcccattagctgctggaatttgaggctaacgtgaagagttttggattgactccactagctgaggaaatctcaaaacagcccagtgtagattctgtctcatggttattagcgtttactctaatgaagatatataataaaaaggggcaggctgaggagaaaaagagcaccagaaagtggagtggaactaagtcctgtgttaggaggagataaaccgattaagaaatggaatgaagggagtggtgacctcaggcaagatcccacccagctaagtttccatttgtgaaaaggaagtaaagaaaagtttagagcccagtgtgggggtatggaggtgcacgcctttaatcccagcactgggaaggcagaggctggcggatctcttaagattgaggccagcctggtctacagatccagtttcgggacagcccagtttgggcagtgaaggacaaacgctggtgaggatgtaactgaaggaggggccatgttccagccccagtaagcagcagaacttggcggtttcagccacgtggttctggttttagaattaaggacagaagaaatgggctatggaatttgcctccaggcccaaagaaagctgctgagggcaggcatgtgtcaggggtgtttctgaatagaggcctagagaggctattcatgaagctatgaagctgaagcctggtccaagctccagccttggaccccaagatgctggagatggcacaatcatgggataccttctgacaagagctgctaacagggagtggaaacagcccaagaaaaaagtgtgttgcagttaacaaagctgaatggaactggagatctgaagagcattttgacatcagacaaggatgcagtttggagtgtaaccaactggttttcagtcttactgtagtccagtatttcctcactatgctcccttccctgcattttggaatggttaatgtatatactgtgcctttgtatgttggaaatatgtgatctgttttttgattttgattttgtaggagattacagttaagaaactgcatgaatctcagaagagattctgaacttcggactttcaaacactgttgagactgggatagactatggggacttttgaagttgcactaaatgcattttgcattattactgtcataagcttatggaagccggggagtggaatgtggtagtttgaatataattggcccccataatctcatagaaagtggcattgttaggagacgtggctttgttggtgtgtttatggccttgttggaagaagtatgtcactgtggggatgggctttaagatttcctatgctcaggacactgcccagtgtctcaatcaactttctgttgcctacaagatataggactctcagctactactccagaactccagctgcctgcaagtcaccatgctctccaccatgctgatagtgaactgaacctctgaactgtaagcaacccaccccaactaaatgctttcatttataagagttgtgtggtcatagtgtctcttcacagcaatggaaccctaactaagacacagtatttgtgtagaatttaccaaatgagcacccatatgccaaaaccacaaatctaaaatttcaaaacttcttgaaatcttattagcacttaaaagacttcaggtttgggatgtacatcagatcagggctattcaatatacacccatgttagacacatgctgtctaacacaaccaccagtgatgacaacatgttctatgtgtgctctaccactgtggttatttctggctatctgtgcctattaaatacttgaaaaacagccagcaacatgtcaaaggaaaatacagaacaactttaattgattaaagtgtggtcctcaaacatagcaatcaatcaatagtaacctccaattattcaaagtatcaagaacagtgatcgctcagtataaactattattttattactattgtcaggtacgtctaatttagctcacaaaggatccaaattcacatctaaagacataaccagacacacaggtgtgattagtgttggcatatgcagatatcctaaaagttcttactcacagaggaaaacatctgcctttagtcacacaggaacacagttaagcaagcgatgttcacagcactgaaaactctcaatgacaagaagatgaagtcgccaacccccacagcgccttcccatattgtcctacgatctctgggtagtcataggacagaaatatgcagaggaataagaattctccaaacagcaggtttgcctaatttagagaagccagcattagtggactggcatctgttttatgtgtttggcattatttagttatgaaaagtaaccacagcaatattcgggggaagcagtggctgtgtgcagtacccatggccatctagagacttgccttggtcttctcaaagttggcttcctcggtcatctgcacagcatgcttcacctgtttataggcacttgtctctctctgctgcacttctgccaagctgctccgcacagacactagtgcagacattaagtcatcccgttctctgtgagcacaaaaagaacaccccaatgagaagtgaccatgtgatcgggtactcagcagtcagaagaaaggaaagcatttgtgcagagtagaaggcctgctatggagggcctgcccagcatgtattaaagcacaacccacagaatgaccctctgtcctccctcagcgagtggcaggcagagctgcctgaaagactgaggcattcatcgcaggaccacatctgcgcgggacaatgcccttctgtggaaagggctggcacatgcgggaccacagggcaaagcctcagcaagagcaaatcacttaggagaaggaagtggaggagcctggaaagggccagttcagaggacgacgctgtgcatccaggcagcctttcaaaaggagccgagtggaaaagagtgacaccagctgaagagaaaccagggtctccctccttggcaggggtggtgccatgacatctactcccgctgcctgaactaacataaaccctcccttttgtatctttctcatgggcctcatttcttccttctcatctaattaaattctctcagctagttatgaacaaaacctgtagtttgttcacttgctctttttatttcagtgggtagtattatgggaccctcaaaccctccggttatatatatgatgctcaaatttaacaaaatgttggccactggttttgatcctgagcaagcttcacccattcctaaacaagtttcagatgtccactaagataggatgcttgtcagggacagcattaggcagaacactaattttgaggcatgtaaaatagtaaggatccagtttcatgggttaaataaactccagatcaaaatctcaggatgccttggaacttatcactgtataaaaagctccagtagagggggctggagagacagctcaggtaagagactttgctcttcttgaggatctgggttcagcacccacattaagtggctcccaaccagctgtaagttcagttcctcgggatccaatgctttcttctatctgacacagccacctgcgtgcatgtggtgtccatgcagacaagctggcacacttgtatgcaaaaaaaaatttaaattccatattcagtaggccagagagaaagatgaggtgatcaattttctacatatacaaagcaaaacacaaactggactgtacatatgcatcatgcacactgtcaaggtaaccagcttccccttgcagcatcaaaaccgctcaacaaaagcccagtttgcttcccactgccagattccaaactgtcagagaagaaacaactgggattgagcagaaaagcaaacattaaagagttgtttggaagattgcaaacactgagcttgaatacccttctaaactaaccaatgactccttctcaacaaatctcctgaagacaagaatttaaactatctgtggaatttggcaaacagccatattttaagaaccatgtaatgctgaacacattcataaaagctctttttgttaaaaaattgttacaaatagcaggaaattcatggaattatgatgagcttccctttaaagcttcctgatttgttttaaattgatgtaaattactcaatttttattctaaatgaaataaaaaacagttaatttttctgattgaatattatgaagcacaataattatgtggaaaagtagaagactaaaaagcagaataaattattccacagtaaaagataaattgaatgcaagcaaaatagaatttgtatgtatttgagttgcaaaacaaaacaaaaaaaagtctaacattagggggggctagcttcataggatttgcaacccaaaaggacctatgattctaaaagaaagccatccattaaggagtacaggtcagtctcagaatcatgtggtcacctcccctaagctcctgggagagttactgaatagcaaaagtcataactcagtgacatcttttatctgccctgttactacagtatcacaaagtgatgtgcttctcataggagacatctttaagccacttatttatttggggggcatgctctttttaagagtagtatttgtcactcagtagatgctcaacaacaacaaaaaatgacaaaaagaacaaatgtatatggcctccaagatggctcattgggtaaaagcacttgctgtcaaggctgacaagctgagccggatcccaaggacctgcatggtgtagagaatgaaccaactcctggaagacggtctctgaccttcacatgtgcaccacgtcatgcttatgtgctcacacaaacatatgcgcacacaataaatcaatgtggaattaaaaacctaaaatgtaaaaatagttttacctgcttttgagcctactaaatttccatattaaaaaatatttaaaaagctcaagtgtatgaatatggaaatccccaacaggaagacttcagacgtgatatcaaaagaaagttccctgtcaattatgagatttcaatggaaaaggtcattattatttaaagagcaaagtaaaagctagttcttctagttgaagatgtttcagaatataaattcatctgctcttgagccacagaacattattaaagctgagcccaaacacagatgtttcattaaatcatcttttaggagacggcaaacaagtaactgaacacctgcacagactggactggcccactccagcttcctccggggaccacgggagaacatggatttccatcttggcagtgcaggaccctacacttagccgctgcatctggcctttggctgtgcttcagctccctcatttccccacagagctgtgcgtccagtgcaggcttgtcagtgggaagccttgcttgcttctacccccatcatcatccgtctgccactttcttagctgacctcctgtctgtcaccccacacttgcctcttgcattagacaagactactagttatctgttcttcggatacatgaagtcaccatggcaggcatccaggggaccactgggcagctgcactcctgctcctgaagggcatatctagtgctaggcccaaggatgttctcacagagggacagacacatgtgacatcatcttccaaggaaaagttctgcaagcacttaaaaatgcacaccagtgacttcagggactccaccagggagtgcctaaggaaacgggcagccacaggatgttaagctcatgctattccacagccccagtgaggacagggctgagctagcactctctatgactgtagtatgtgggggaactccatgcagcagtcagagcagggaaaacccaggtaaagccatgtgcctcacacacaaaggacagggtggctttaagagatgggtgccaactttatcttgaaatatggagtaactaggaaacgccactgttaattttaagcatttaaaataaacatcgttttaataagcattattactcttggttttaagggaaagtccaggaggctgatgaagcagttctttgttccccatttttggaaagctccctgctgcagtctttcaaagccaactggacaggagcctgccaaggatcacaaaatggaccaaaatcccaggactacgggaaacatttctcaaaaaaaaaaaaaaaaaaaagtatccaggacttctctgatgatttttgaattatcatcttgatagttaaattttgatcactgagaaaaagaatgaaagaagcaaatattattttgacctactttacagcacgaaggagcctgagtggaaggcacttcagaaaaatataaatcaacttaaaaaacaaatattaagctactcactacaatccctacaaacccaatataaattaccacaaacagatggccgctctggtccctgtgttaacacctcatcccctcctctcacacaagccacaccccccccaacacacatccaagcagtacttgctggaagatggaactgagtcagctgacagctggcttcacaaggccaaaagggctccagcaaactctggatttatcatatttatggtccaattttcaaattttacctaaaaccatgtagcaggtaccaactttaaatccacgaagctagaaatctaaccctgagggtcagggtgccagtcagtaggcagccttgtgcactggtacctcagaaaggtctaaataccagattagacaaagggagccagacaaccccaaactcctagaaatcataaaagcagagacctttcaccccattctgctgctaaagcagaactcgaagcgcactgctgacaaagcagaaacgggaactaagcagtctggcatttcctttccggggctgagatcaaacttaagatagtgacaacagaattcctaactgaccaactaatttctaaatgaaagccagacgctcaatcactgcagacatggcagcctctgtggaccacttttttcacaccctagaggctaaagtaatctacttaatataaaatatctttttacattttatttttataatatttccacgtaaagctagttaccaataggactaaagacaatttgaaacaaatcttgaaatctaatgaccttttcatactttaaccattgctaaatatctggtgcctagtctttcaaatctttttctatgaacctggagaaaatatctaatactgtatttgacctagaaaatcaaatgtctttgtgttgacgttatctttagtagttttatttagtttggagttagtctcaacattagttcacgtgtgtcctcttcacttcttcttgtgtgtgaacatggatatacaagtttgtgtgaactatgtgtgtgggtgtgcatacaccaccttaatttttcacatttatctactctgtatgtgtgtgtgtgtgtgtgtgtgtgtgtgtgtgtgtgtgtgtgtgtgtgttttacacatgcatgtgtcacagcacacgtgtggaggtcacaggacagcctgcaggagtcggttctctacttccatcacatgggctcagagatggaacttagaccatcaagcttggcaccaggcagctatgctggcagagccatctcttcagccttcaattcctttttattctgtttcttttctttgagacagggtttctctgtggctttggaagctgtcctggaactagttcttgtagaccaggctggtctcgaactcacagagatccgcctgcctctgcctcccgagtgctgggattaaaggcatgagccaccaccgccctgcattctttttatttttttaatactgtccataaatcatcatagttgacacaaccacagtttagattccctttgaaggctaaccaggcttccacgtcattacaaatagtgctacagaagcattcttatgtgtgctctactgtgagcacatatgagcttttcttcacaggaaaccagaatgcataatttaaacattaatggatagagctacatcaccctgccaagcggctcggctagtttcatagtgtcaccagcagggcatgaaaaatgtttgcttaatcttggccccacagcaatcatcaattacttatcttcaccagtctgatgggtgagcttttttcttgacttgaatttccttaagtagaacaacttcctctctcacaaattccttcctttttctcacagtgcagctagtcagtgtgtcattttctatttcaaaactttgcacattctactactagttagttatacatgaaaagtattttcctagtcttttactgtaatttgcaaattttaagtaaattaatttaattaaaattattttagtgctgggaactaaaccttggacatgctggatcagtacccatcctctacatatccaaccttgtgttctgtgagcaagatcttgctgtatagtttaggctggcttagacctctcaattcctctgctttggtctaccaagtgctgttattacaggtgtggctaccatgtccagtgctcatgaattaacttttcaatgggtcaagggaatgattgtttttctgtttatgactttctctttgcgtgtcatgcttaggatacaatatcaaggctgtccatttacttctaatactttcataacctgaattacatttggctctgtatacataattcatttttgtaaagcgttgtgggatctttaatcgcattgtgacactccaagactgttaataaagttaaccttgaagtgggggcagagccatagacagctgactggaattagccttagagaagccaggaatttgtatagagaagactaaaaggaagaaaggggcaggactagagttgggcaggtattataactgcctccagagttataatacctgccacacaaaattgctttttaagatgaaaggatactgttttctcagttgcctagctcagcccttatcaaataacaagcattcactatatattacttgggtctgaaaaatctattttatatatattaataagggtaattgttttattgaatatatgtgaaagctttttaaaaacaattaataatataatatttaacaaaatcaaaccatcactgctgatctcaaccatcagtcatccctggcagctcccttttgtacagaaatcatccactgagcatgtgtggatctcacaggaagaacactaatccctcttcatccactgatcatgtgtggatgtcacaggaagaacactaatccctcttctactctgtgaagtgtggggtctttagtatttagtgtcgagacagaattcagcagtagaatgcagagaatttacaaagcagggataccatctcaactactgttcaaaacacctggtatcagctacttggggtgttgatggcatatgcctttaatcccagcactcaggaggcagaggcagctgggtgtctgtgagttcgagaccagcctggtctacagatcgagttccagacagcctccaaagccacagagaaaccctgtctcaagaaaccaaaccaaaccaaaccaaaacacctagcatcatttgaaaagtgaggagaggggaggttaagcagctttagtaggatgacatagcaaaactagactatgaattcaaggcagtctgcctcaaaactcagtgctcctgttcataaagttaaactatcttggtaaaaatcccacaaaggtacatactttccccccaaatagcagaaaactgaacagagcaataaagcaatttgtctataggtcaagacagcaaaaactgtctgcctataatgatcacagtcatcccatgtttgcacacggactccaactacaggatctccgcgattgctaagcactcaacaccaaccttagcaccagataggaagcatgaacaccaagtgcccgcccgacccagatactctgataggacccagagctgaagcaataaacaaaataacaatgctgctttcatgtgtacacaatgtcttctaaaactactgagaaaatccatgaagtcagccgaggaccaagagggcagggctcagtgagggaatacttctgaaatggatgctgcctgggcttttacaatgagcacaacagacagaggggacaagagtcatcagcaaaggaaagcacagactgcaaaccagcactgggtgctataataaataataattttcaatttccattcaatgagttttacaggaaaaaaaaagaaaagaagacttcgtccagaagaagctggaataagagatgcatgtggaaggattgtagtatttcagcctgggccggaacttggacaaaagctcctccataatcactccctagtcagccttcatctgctaatactgtgacagctgcatccttgcactaactcagaatattctttgcaataggcacacaaagaagatgtgctaatggtccattctgtctaaaccacactggaaaatcccagatgtggtgcaatctaaggaattcccatcttactcggtcttgtgaagagcagtgttaaggctggggtcacagaactgggcgacccatgaagattatctatttcaatcctctcatttcaagtgagatctgaactaacagataaaatgctttgttcagtggtatggtcacccagagctggcagaccagaacctagccatcctttcttcaagaaagcttcaataaaggaaccatataaaatctggtttatggagccgaaccacgtatgacttagcatgggatagaagggcacaatgtccttagagacatgataccttccactggcaaagactccagacgcaatgcatacttacttagtcattgtctcgatggcctggatatgcacgttgctatgggtctgggaaagaacagcctcatgctgggcacatttcaaacagaggccacctactcggctggacactccagtagccagaagagaatctttatgcttcagtctttccttaagatcctcacagttttgctgatattcaactaagtccttcctaaaagaaagtggaaaaaaatctaggcaatgtccagggaaaagcacagtactttcaaatgaagcatcagagagaacttttaccgccattggtggtgttgacgtgtggtgtcttactcattcccacagttcgaaacacagagtgattgctttgttgttgtaccacatataaaatgctatcaagtaatgcacatgttgatgacagtcagttcatcagacattaaagtctatcttaagaacccatccttaggttctatctgtaagtggataatttgttacctcagaagcatcaactgagactccagaagttcactcttcgcctcatatgtgagtttcagcctctcctgtggaacggacaggaaagcacattttgccatgtcttgttttcataagaaaatctaaatgctaaatattaactcaagtttctctctcttacccacaggaagaacaatgctgcaggggcattgtcactagctcactctaactctgcattgtccctagctcactctgactctgcattgtccctagctcactctaactctgcattgtccctagctcactctaactctgcattgtccctagctcactctgactctgcattgtcactagctcactctaactctgttttcactagcgcactctgactccactgtctggttatgggtgaatttcaataaaagcaaaaaaaaaaacaaaacaccccactgggtcccaaaatggtgactgcctacaatttttattttctttaaaaaccgcacagagtaggtcttcccttaaaagggtaactctgcagaaaactgattgtcatttagtaggttcatgatggtaaagcccaaaccttaacagaatcgcccattgtaagtgaagcatgtctggcatgcaatatatacacataaccaataaaaaaggccaaaagttgaatgcctacaatgatcagccaaatggccaccctatctctcagccagctctgtatgcaacctaccctttaacaagtacttctacggtatctacacaaagatgcctcaaacctcagcaagagcttacactctacaaggaacagaatagcacaggactctatgagataaatgggagggaaaacaatgcagctaaaagaagtccattgggcttcccagagcaggtgtgaagacttgaaggatggtttccaggatgtgggaggctatggaatctaaagacaccaccccatatctttgaccatcctgattgcagcactggaaggtaaaacgttaagagaaagagtagctggatatgggagaaacagaaaagctggggatacgagaagaatataaatgttaagaaatttatagagccaacccatgtagccgaggcactggatatacatggagactttttatcagaatggatcacacatcagaataaagggggaaggaagatgcttataaagaagtagttacaaatacataggtaggaggtcaaactgtgaaccagaggaacccaagaataaacactgaaaagtaagtttttaatatacaagtattcaagagtcaggatgactgacttttataattggttagatgtgagataggaaaagaccctaaaaataatccaaggtttccaaattgagcaataaagtgaatgctagtgctaaatattatttaagatcaattaaggaaagaaaaagagctcacaaaaataattcaaacaatgacaaaagggagagtaagcaatagtacaataaaaaataactcaaaaagcaagatgatcatgttgagtgaacaccaaccgcatgaataatcccaacaattaacaatggcacagataccatatcataaaactaacatcagaatggctggaagctgaagcccagctgtgtgcttcctcaaggaaactcccctcagataccaagataaagataggttaaaaatacaggacaggaaaggagaaatcccaccatgctaatgctagttcttaaaaagtgtgacttagtaaaatagcaaaatctataaattttatgtcatgtaaggagttaggaaatgaaataacaaaatagatgtcatttatgatagcatccaaaccatgctaggaccagttctaatgaaagatatttaagtcctttactcagagaaactaacatctgtccagcatggcagtacattccatatgccctacactctaggggcccaggcagaaagatcatgaattctagaccaacctgggatagaacatgctccaggacatcctgggctacactgcgagaccctgtttcaagaaaccaaaggaccaggattacaattcagcaattcaatctttgcctagctgtgcgtggcctacattttgattcctagcacctcaaagagacaaaaaaactaataaaaattagggatgacttaaataaatggagtatgtatacagttcccaaggatgggtgaaatggtgttataaggatattaattcccaaatgacacatactctggaggcaatctcaatcaaactccacaatgtaaaagccaaaatagcaaagggattcttttggacatggtctaccagactcacgctgtcatagtcaagacagcacaatgaaacagtttctgaagcagagccactctgaccccatgggaaaggtgtgtgatgcaggggaagcttcacaagagtattattgccttatatgtgtaaggccttgcattgaaccctcaataccacaaaaacaaaacacagaaagtaaaccatgaaggcaaacgactacctttgcaataaatagaactctgatatattgataaacgcatgagtgaaaaacaaaatgtgattggtgtgcttcacgtcacctatcaagatgaattctgggcagattgcacatttaaatgtaaaaggcacagctaaactctgtggaaaagactttaggaaaacatcgttgtgtctaagtagaaagagactttttaaagaagacacaggaaggcactactgaatgaataaacaatgaattctttgaaaccgaagcaagcaattagttaacagaagaactaaaaaagtaagcaactctctaaaaaatgagactacaaacttcctatacatagtaaaatgtgtgtgtatgcgtgtatgtgtgaaagccttgtacctgaatatataaagaactccccaagtcaacataccattcaaatgcaataaaataaggagaaggaggtaggaggtttgtcataaactcaaggatagcctggggtacatagtgagttccaaagcagcctggactacaaagagagactttatatgaaacaagcaaacacagaaaagacaaataaacaaaacccccaaaatggctggtagcatatgaagaaggtcttgggaagtcaggatccctcctgtgcagctgacagggtataaactgtaaagaacggcctggaagacagccattaaaactcagtctaagaggaacactgacatagcctaagaccgggagctccactctcggggagatctgtggggtgcaccccacaggcacaagccagaaacaactccaatacccatcaacaccacatgagccagtcgtagtgtgaggacatccagaggcccctcaatgaaaacagataggcttctgccacacgcggtgacatggataaaaacaccatggtgggaaagaaaggtcagttggtgaggcacacaagtaatctcagcacttgagaaacagaggcaggagggttgagttcaaagctagatttggtaccacagtgagctcagggccatcctgggctgtatgtgaccctgtctctaaaagtcaaactaaatttacaagaaaaaggggagggcagatggggaggatgggggaagagaatagatacaaaagaatatacaccattataagattccatcttataggtcactggcaccggcaggtcacccgcaccgggagagccgcgggcgtcaggatgtagagatgggagctcgtgtgagccacgccatgaggaacttcaacctggagaatcgcacggagcgggagatcagcaggaccaagccctccacggctcccaagcacacgtccacgcacgacctcctgcgcgagcaactgagtcagcacccagaaatcaagaagttttttaggaaagataagctgttgtcattgctaaaagacgtatatgtggagtccaaagatccggtgtcttccctgccggtaaaagatgttgaaatatggcaagaaccaaaggaatttagactgccgataggacatcatgtggataagaatgtcgtgaacattcccaaaggcaaaatttctgttgtagaagcattgacacttctcaataatcataaactttttccaaaaatgtggactgctgagaaaattgcccaagagtaccatttagaactgaaagatgtaaattcccttctcaaatattttgttacttttgaagtcaaaatcttccctcctgaagacaggaaagcaatacatcaaaatgaagaaaatcataacaacttcctgtatgtgctcccaagctctgtcctggtttttagtgtattaaattatataagttactgtgaaccgagtgtccctaatttgagcgctgtttgacctcttcagaattggtcatacaatgttgttcttttttttttttttaattttatgtatgtttagttcctgcgtatatgtcagcatggctaatcccatgtataaatttattacatgtatgagaggttatgtgtcattttagacacatcaccttttaaattgatcatgtggcccaaatcatttaatgttaagcttcactactttcctgtttaggatggtttgttctttgtaggagatgcctaaagcaagagccctcctgactcctgtaagactggcgttttgttagggagagattctcagcactgagacatggtgactatttcccaataaactgagcacaaaagtggaaaaatatttattagcactccaaagaataaaggtccataggttttttttttcattttgaattggttttaaatatgaaataactttttagaagaatttgtgacatctgtaacatgttagcagtctctcttctgacagaaagaggtaacttcaaaagcttttggaagaatgggcagttctgagttgggcattggtggcgcatgcctttaatcccagcactcaggaggcagaggcaagggatctttgtgagttcgaggccagcctggtctacagtgcgagtgccaggataggctccaaagctacacagagaaaccctgtctcagaaaaaaaaaaaaaaaagaatgggcagttcttacaactatttgaacaaataacttcctctaatacagaaataaggaaaatatgtaagggacagttaaaaatacaaggatctaaattttatgatcaagcatttttgcctattttaattctgggagaaaaagtaacaagcagaagtataaaataatagtccctgaagggacctgggaaattaccaattttttcacccactaaactcgggagcataacactccagtaatagaatctcagatgaggtagcatgatgtgttatacctgtgggttcttggctatattgtttggcctctctgtaactgaatttctataaaggtataatgctgtcttgtgtaaattcctggacaatggtgaagataaatgacaaaggaccaagcaaatacaaatcttcgtagttaaaaataggtgactaaagaacatatgactgaattgtctgtagtttgataggaggaggacagaatttaggtttccaaaatcctactagtatctttatctattatgccaaaaagaaacacatttggaaaggacagaatggagttgggggaattaggagtgtccatatcttttcaagggaagacagattttcctcgagattcctccagaaatgaggtggaaaactctgtatggtgatggaattaggcaggtgtgacagcaaaagtgggaaatgattggaagtttgtaagcttttttcaaagctgtcccagtgaataaactgtacctagttattagtggttcaatacagaagcttaaaagaagaggctaatcccaatcagtgtaaaattgcatttgaaagcacagtcagccaaaaccatcctccagttcaaagtgaatgctttaatcactagtactgcttcttttgactcattttttcctgtgtgattaggcagatcgtaaatatggtttctattattggaatcatacaataaaatacttccttttttttaaaaaaagattccatcttatagatccttttttaattggcaagattcaagtacaatcttcagtaatgcattcttggcaaatgttcatgaaaatcaggatggtgactagctatgggaatgaagagacagggaatggcagagcctcgggatcacaagagaagtaaaaaaataaaaacatcctgatccatgggataattacatgagtgctctttcagagccaaatcaccgggctgtagaacttggaggaccttaatggatgtgtctaagccgtgccaatgttagaaatgttcaggaagagcctgtggaatggcgcacgtggtatcaaaactgttctggggtagagttcacttgctaccttagaaaagcaggctgaatacactgtcagatatcaaagtgacagtgggaggcaaggcaagacataggaagacactcaactgatggggaatgtacttctgtgtatgtttatcttattgattgttaaataaaatactgtttggccaatgagacagcaagttcgatgggactaggagtcaaagaggattctgggaaatgtagaagagaagtggtgatccaggcaggaagtgacatagcaaggagactcatatttaagcgaaggagaaacaggaaggggcccttttttcccattcgcctcctccagcagcaggatgtgagccaccagctaggagggacgccaataaggcgtccgataagataagtcttataaaatatatagatttatgataattaagactgagctaacagatgagaatcctagtcattggccaagcagttttgaacttaatacaagtttctgtgtattcatttgggcctaactcggacaggcagctggcataaagctcacatgtggcagtggggctcaggcggcttttggcagaaagatttatcgtaacactcaactgtctgtaaagtttgggaataaaggagattaaaaacacagggacaggactgaagatatggctcagaggttaagagcactggctgccctttcagaggtcctgagttcgattctcagcaaccacatggtggctcgcaaccatctgtaatgagatctggtggcctcttctggcatgtaggtatatgtgcagaacattcatacgttaataaataaaaaaaattaaaaaacaaaacaaaaaaacccatggggtcatgaaggggataaatcaaaaacaaatcttgagaaaccaaagacatcagacttactaaagaaacggatttaagcaactgccttgaatgcagccaaagagcaacaagaagaatagccaaagagctagagaaagcagggcaagttccaaaaaggaaccaagaaaaactctagaatagaaaaaatgcagtaactgacacgacaaatcccttagaggggttcgaaagtggatgtgggaaggcaggacaaagcgctggagactgacaggtgacagcaacagtcagctctaagaagcaaaggggaaaggtgaacaatgaccatatgatccaacaagtccacttctagatataactcaagatactaaaaagagatgcaaaaaaaacaaacaaacaaaccacaaactgcaccccacactcaccagctctagcttccatttttcagcatcaccagtggatgtagttttgccagattcagcatcaccatgagaaaatggtctcttcgcagcttcatccaccctagaatcttctcctgtcttaatccaagaatcctgaatgtttccctaaaataaaatgcaccattagttgcagctggcattcaacagtaaataaatatgcagactataaatggaccatggttcccacccatggggagacgcatatgttgaggctctaagtcaagcatcgctttgcatggtcatgccattagggctctgctgcagatgggtagtacaggtcaagtgcccacatgtgcagagaataatccaaatatccacagaggagcctggatgcctatgtatttaccattctcgacagaaacctgatagctcagtctcagtttgtctttccttttccgtattccaaggaggctaaggcaaggccctgggtaccattttcagtatcaaaaaagggaaagaaaaaaagaacacatgtgcagctaatagaagtgacatgtgccacacatctcagggactcacaaaggagtggtggggagcaggacacatagctaaaatgtgccataagcaaacaggaacagccatttccatgtgggaacagaaatccacatcatcataagattaacggtaaggtaggttattgttctccactgaaaacattactaaatgctggctcgcagttggtcgactttgaggaacctataaccaatttataatctctgttttcaatgttcaaggagataagcaacttaaagatctgggaaatgtatagaggcaataaggactaccatacttacattaatttagagcctttgctaagtgccaaaggatgcaatacttataaagaaggtgaggcccccagacactgaattatatgaggcagtgccacgctgatctgtaatgtggccgacattccagggcagtgctgatcctactccatattctcttgcaagcttagtttactgcaagcatgtgtatagcacctattatgttcagacatgtgcacaggacctactgtgtgcatatacacttgtatgtgtattgtgctaaaaaaaaaacaaaaaaacaaaaaaaaacccatactaataacttggaatacaaaaataaaaataacaaagcttagcaccaatgggtttacagtctaatgaaggaaaatgcacaccaaagtagacagttaggagtctaaaaggtaagttctgggctgcaggtgtgccggagaaccaagaaaagtcaactacacttccatcttggccccctcctcatacctcacaccaatttccgcaggaattgctttaaaaagccccagaccagaagtttgatgtgtttgatatgatggtacctcaggtagaactcctcctgctatataggagctttgtgggttttgttctctctctctctctctctctctctttctctttctctctctctcatgaatctcacccctcttttattccttctctctcctcccctccatcccacctatgaacctataataaacttttctctaaaactgaccctctgtaacctgtgacctgtgaccttcatttctctaatttggtagacaagaacttgaaagccactggctttggtggccattgagttttccaggatcatagctcttcaagccaagaaaagatcagttgttcccataaggactaagccagaatagaggaaggaggttgagaggagtcagaaattcaaatgagtttttttttggaaaagttttggtcctggcatatcatttagatgggaaaaccttacagaaagaggacgcctcccaagaaaacctggagtgggaatgagcacagctcccacaggagtgttcatagaaaggagaaggatgatggtaggaagctggacaatccagagggtgtgggggatggaatatagggtcccaggttctggccaccataaacagcggtggtgccaggaaactccggcccactattgtattgttaatgtcagcaggggtacttttgtttaccatggcctgagggtaatatgcctcttatttgcatctgtatgtgcctaagcatctgtataggcctgcacctgggcagggagatcagaggtatgtgagtaatgtattgaggaccaaggttaggagctaagtgggcgagctgcgagaggagaacaaagagaaatggttgcctcctagtattagcaggatggttaagagacaccagaaaagatggctaataaagaaatagctctagttccacaacatggaactgagagctctctgaagatgacaagatgcctgtgtttggtctttatcgccgttgggttcctcgaagcttccaggtccacacacccccactcaggtagaaccccagggaataaggctgagacatgctgggtcacaacaagaggggtcccaggcaacaagtttgcaagcttttgtgtaagagatctcgctctcgtaagattgctcctattcaaagttgctctggagtcagcaaaggatgagggagggcactaatctcctctagagaaactggctaaaacacacagactacactcatgatataaaatattattattctttaggaataagtgcttgtcttctacagatagctttaaaaaacttgaatagtatttaaccgattttttttaatccttaaaatcattgaaaacatcttacttattgtcagaaacatttttaattaagaaaatgactcagaaattttatctaggtagaaatacctacctagaccttcaaataagtgccacatttctcataagtaacatattttaatattattgtaccttttaagtacagagaaaactttcctggaagggggatttcatgagagtttaaaatgaattgtatactttaaatagttttcttaaaataatttgttatttttattttctgtgcattggggttttgcctgcatgcatgtccatgtgaacatgtccatgtgcacattctgttggcaaatactctttgctcagactgccaggcagatgcactgtgccatcacttcacttctttcccccactcattgctcccttctcctgatgagaatgtgggtgccatgtgggtgctgggaattgaacccaggtcttctggaagagcagccagagctcttaactgctgagccatttctcccaccctgtatagttttagttataaaataggatcaccattttttatgacatctaggtcatcaactagctcaaaagttctatgtcttgttggctagcctgagagtgcagagataaaatggagaacagagaatattcctctcttctctgggaggaatctcaggtctggtgtagcatgagcatctcccactaatttatgcagatgtgcagcacaatacaaggttggggggctcaagagccagacagtcctgggctccagtccttgctttaccattttccagttctgggacagtataccagttacttaggttacttaactactacatattttaactttctcctctgaaaaaatataaataataacacctgccttatagggttattgtaaagctgaaataatacaagataaataataggcttgaaacagtgccccgacaaatgatagttattactacatcattgtttcagttattcacaaaagagaacattgcacgacactgggatatctaagttcaaattaaccaatagcattgttgagatttagtgcgagcatttgtgtcactagaaaagcctactcttccttagaaaaaatattcttaacctagcagcagttaagatctcctgaacaatcttattcatcctaactggaatacggtatgcattggtgaaacacctcttaatctactcaagtagaaagcaggggcaactgttctgtaatagtggataccccagaagactaagggggtcagctggcattcctacaacactcatttcaatctttgcagtgcttttcatgtcatgtgaatgagtaagatcaacaggaaaacctccctggaactgtgtttattctaagattgtggctgtagttttcttttggcaaatactctttgctcagactgccaggcacttgggcttcgccatcgcttccttcccccatgtgttgctccctttggctgccctcttatgcacttgtctgtctgatttcctctctccctccacttcctctctcccttctttgcctctgtgtaagtattgaagaccatgaataattgattcactgtttagtgattgtatagttttaagaaaagcacaagactatttttcaaatgggctattcccaagtactttttatagggtgatatgtctttttcaatttgacattcaaattataagtactaagaatttttaaccaccagtgttaattatgtaaagcttcaaaataattgtatatcaaagggtaagtaacttgtcgaaaatgtaaaaggaaacacagaaaagcaaatggaaacactaatcatcagtctgatggtgagttttcagatgcttctcagcaacaaatgagttgcttctcagcaaatcattcttacacacatgactcaaggatcagaaatgaaacattgagtcagactggggcaagaaagcttcaaagccaaaatcagctgatacataagtacatcaagactttcacatattcttcttaatagaagtgattttctaatgacacttaagtaaacgcacaaaaacaaaaacaaaaaccctataaaggacaaagtaagccacaaccagcaagcattaaaactctcccatggaaacccatagagacagctgacctgagagttcatggactctagaccaacagctaggaagcctgcatgggactgacctaggctctctgcatgtgagtgacagttgtatagcttggtttgtttgtggatcccctattagtggaaccaggatctgtccctggcacatgagctggctctttggagcccattccttatggcgggataccttgcacagccttgatgaaggggggaggagcttggtcctgcctcaacttgatatgccatgctttgttgactcccatgggaagccttaccttttttgaggagtcaggggggtgggagtagtgtagaaaacaggtgggaggagggaacagcaggagaagagggaagggaaactatggttggtatgtaaaataaataaaaaaagaaaaagaaaaaaagaaacctaccatggaaggtacaatttgtctcatacagaggaacaggctatgatcagctgtgtcccatgggaaaattgtgaaagaaactttttaatacaagagtatctttaataagtaataaaaagatattaaatttaaacataatttaaatacaattccaagcattttgtgtcatagaattctaaagataatttgacccactcttcttcaaagtttggccactgatactagaatcccataggtaacttgaagcttatattcccaggacacaaccagaccaggaaaatcagacacaggggatggaacccaagagctcctattatagaccctgatgtgagtaaagcttctcaaattactaattatcactgaggttaagccatgcaagtttcattaaactacgtagtaaataccaccagaaacataaacttatggactcttgaatctcagcctcacagatctgagttctttcactacactatgctgctcatcatactaagatcttagaaggtcaacagagttgggtaagattctgaaccatttctagatttagtacaattcctcctacgtaacattctgtacttgcaggttcctctttccatatggaaaaggcacaagagcatgctcagagtggaaactggagggacttccagccacctgttctgtcacttgcagatccagtccaccacatctgattctaacttttgaggcaccatgcaaatttgagcattacactctcaccaaacttcaaagagatgggcctgataagtctgatctgtgcatcattgtccatatgagccccagagtagccatgaatgtaacccaacacaaaataatcaacttacttaaaatactatgagtttttgttttgttttgttttgtttctttataattcaacttcatggtatgaactttgcagttgacaattttacatcaaaaggctggacaaagttgaaaaactgggataaagtataggaagaaacattcaagataaagattgtggttacaaacactactcacagatgcatccagaagtgtctgctccctcagtgtctcctcctgtctttgagatttcagttcttgctggagcctttcattctcaagtacaactacctgtaccctatttttcattccagataattcatcctatgaaaagcagaaatcaaaatacattaaagcattttaggcaatacttatatttatcaattactatgaaatctagggtgaaataaattatggaagacttatgctatcaatttcctgacatacaacaattatatgaaagcaggaaaggaaaccaacattaggtaatattatcaagtatccaggttacttggtggacagttgaaagcccgctgatgaccacatgacaaatgagtcctttttctggaagtttgtttcttcacggaatcaaggactagagaaaagtcttatttaaaatgattatctaagagattttctgctgaaaagtaaattactaccaaaggtcaaatgtcaataccatgagaggaataaatggaaggagagacaaatcatagaaattacagtgtctatgaaccagtgcccagaaaaatcacaaatgaagcagtctgctctaatgtttgagcattcttagtttatatacatccttggcctagcaatgtgtaatataaggaattagggaagtcatgacttgaatagttactgagtggcaactcactttctgaaaataaaaatctcaaatatatgaatgtgtaacctaatattcattactactgtaaccaaaagctattatgcaatatgcagatttctttttatctactttacggagaaaaaagcaaatctgtaattaaatgttgtaatttgaaaaatagtttcaaaattccagttttctgtcaggcatataattgagcttagaggatatcaacccagtctctctaataaaaaagtttaacaatctgaaaatcaaaattcttcttagacccactaagaaataaagtcacagagaaagctgctcctccaaattaaagaaaacatacttagaattgcaatacctgagaagaaacctctgcagaagccagtacttacaaatgaaaatccaaattataattgattaatggttcaaagctcagtgtggatcagtttaagatttcaaaactctagggagatcaagaaccccctcagagttttaattctatgactaccaagtattcaaagtaaagactagaaataaatccacatgccaggaagaggcaaagcagcacttgtgaaatatgcccaggagcttgtgttctctgtaataaggcctgcctccagtgaaaacactttcaaggacataaagacactggctttatcaaagcttaaatggagtgggataataataaacacacaaccctagtcttctccaccctccccacctccagggcacaggctcagtaaaatgtgaaagggactcggaattagacagcaccatgtcccctccaatgctttaccaaaccaacagggctcccagacaacagtggagaaagtcaacctacagaatttaaggattctctaaggaaaggagacaagtgcaagtccatggaagaatggttccctgatgtttatagtaaaaagcaaactgtaaaagcagcctaacttctagtcataaagccaaggcctcacagtaaaggcttactgttccagttaggtctctggtatgtgagaaataccagaagcaacttgggagaggaaaggatttatttcattcacacttcctgattacatacagcaatgaaggaagtcagggcagggtctcaaggcaggaacctgggagaaccggcagagctacttcgtgactcttactaatgctgaccatggacagcattcgacaaaacaataacaaggactactagggagttaaacaattagaaatggcatgatggagagtaccacataggaacagtccttttcagtagattgcagtaaacatggaaactaagaacagcaaatttcaatataaggtataattgacatacattgaagtcttgatgagcaacttaccttgcagaacttaacttctgcttctaaatgatgaatgtactgagactggtcattaatgatgggaacaaggttgtagacagtaggcgtgctattgtcctcacattctgatggccgctaagggaagaaggtcagatcaggcagccacacacacaatcatctgattatcctctacatgcaatctagtgctggcgtgacagaagcaaagactagatcacagtgtaccacatcacagaatacacacagtatttatatctttattctagaaactccacaagtataaggagaggagtattattttggaaagatagagagcgaacagttattaaaagcacacgacacatggagtttcttttccagagcagggtaccgtaactggctggaatggctacctgcttaactacctaacaatgtgacagcccatacagaatgctgagacataatgaacagttctcttcaaaaccttgtctgggaagaggaatgccaactgaaactgcacatcagctcaccatgtaagagacttcagacagggactcggaagtcagatgcatgccagtgaagcaaaattctattccaaaggggcacaataaaaattctagagtttggggtttcattttgttgttgttgttgagtggatgctttaggcttgtgcagtctctctctctctctctctctctctctctctctctctctctctgtgtgtgtgtgtgtgtgtgtgtgtgtgtgtgtgtgtatgtgtgtgatcctcattttgctgcaattcaaaactatgcatctgtgggcacagatcctctaaggtaagccctaaaagagacacgcaagctgccctaaggagcctaagaagacatttcagaaaaagttctcctactgttggtttttaaggaagaaaaaatcaggaaaagggaaatgagagtcaacagtcagcctgacaggaaggcctgcaaagagacacttctatttctcactcagttgattttcatggctttgacagagcagtatctctgactgaaatattttccatcctaagaatagggctgggaactaggattgtaatgtaaaacaatcctgtttctaattcaaattaaaaataatctgagaaaaaaaaagatttgaaatcaaaatacaaaaaaataaaaaagaatagggctgagtatattaaagaatgaacccgaactagaccaaaatcataatctaggccttaagtccacaatgtacgtcacagagttgctaaaaaggcactgggcctaagtcctggaatcttcgcaatcattagggaagatgatatatttagacctctttagaaaccctcaaagtaagatataaatattagcaatcatagcagcagccaccttagaattctggtacgtgtgacaactgaatgtaaagcctgcaggctgtactctataaatatgtggcatgccttggctcacagaaagagtgtcataatggcacccttgaaggagcactgcattcttcacagtatacaatttatgctctattcttgctttagagaaatacacttcattcacggattcagaatttattgctattgattataattttagtaagatatcttaccactcagtgcatttactactgctggtgtggtttctagaacgcccttaaaagcatagtgaatgcagttctttcaagtccattagaggaaggtgctagagcggctgcgcgttcatgtaccctccctaacttcacaggcaaagctgcaaactagcgcaacagagcttactcagtcacggtagggagaaacgtctgcaccctgagaatttctttaccattgccttacaagtgcacttacaggagcatatgtaaaagagggcattgtgtactgactgtaaggcatgctaattagaagtcacttttcaaactgtgccatgaaataccctcccatagccagcatggcttgttagaagcatgtgggtctcctgagagtaaaactaaggcattgttgggatggaaagtatgtctagtattttgttctaagtgtcatagatggatatccaaactataacaaactcttcaaagtatatacaaattcaaaaaatgctgcataatttctcactaattataacattaaatgaaacagcattaaaaggaggggatctaacattacagttagcaacctacaaatgattaaatatagacaggaacttctaagaaatattactaaaacatgcttttgcattgactgtcattttatatattcactaacatttgcaaaatacatttctcaaactgttctcttgcccatgcttttgaatctaaaaaataaattaaaagtatcagtttaaatgatcagagatgaaggaatttttttctaaaattcctgtgactataatctggaatgtgtgcaacatgctcaaaatgagacaggaaaataaagcaaagctagaaatcccatgcttttgttaggctttaagggtgacacttaccaaaggggacatctttcgtcttcgtggtggagatatttcattgtccttacttgcttgttggcgcaacaaagctttgagttgactgactacagagcaaaagcaatgaatttattgaccttgctagagatccatggattacacacagtttaggttgtaaatgtcccccaaagaccatgcattgaagaaaatgcccctcacttaacattaatgggagataaaatcagaagaggtaggaccagtgaagaggtggggatttgactattaaattaaattatgaaatgtgggaagtcttcaagttactggggaggatgggcactacctcttctttctctttcccccttcctggcatgaggtgagtattttaccaatctgtatgtgcctgcctggaggaacagccctgccacatgcctaaagaagcaaggccaattaataatgggctaaaacatgtaaaaataagccaaagtaaaccattcaggtatgttggcagactcctgtaatagcatcacttgggagacccaggcaggggatgaccacaagttcaagcccacctggtctacacagagagttcctggccatccaaggtttcacagcgagactctgtcttcatgcagaaaaagcatattctttgtaagtcttttttatctaagatgttgttatattgatggaaagtagactaacattttattaccaaacatcaatctagcaaatattgcttaaactactataggcaataaaaactttgctattggctggggatacaaagaaaagaaagacaataaaaaaaactgccttttaagtaagaatgtgataagcacaatagttacaccagcagatatatgtaagcttttaatgtaatcccagagctgtgcacaaagcttcatggatagggaacacagcactgtctttgctttcacatagacactaacagtgatagtcaacaggacatagacactaacagtgatagtcaacaggacataggcactaatagtgatggtcaacaggacataggcactaacagtgatggtcaacaggacataggcactaacagtgatagtcaacaggacatagacactaacagtggtagtcaacaggacataggcactaacagtggtggtcaacaggacataggcactaacagtgatggtcaacaggacataggcactaacagtggtagtcaacaggacataggcactaacagtggtagtcaacaggacataggcactaacaaacagtgatagtcaacaggacataggcactaacagtggtagtcaacaggacatagacactaacagtggtagtcaacaggacataggcactaacagtggtagtcaacaggacataggcactaacagtggtagtcaacaggacataggcactaacaaacagtgatagtcaacaggacataggcactaacagtggtagtcaacaggacataggcactaacagtggtagtcaacaggacataggcactagcaatggtggtcaacaggacataggcactaggtaaagagtgtgaaaggcatcagaagtgtcagtcacgaggaactccagtataaaaatatggaagcatggtcaggagttgctaagagacagctgctttctaagacaaatggtttggataaggcctgtgaaaaggatggttaagatgacagcagggaaaatctgactggagaagtaggtgagggaatattgttaagtcagaaaaatagtattattccatcctaaagattttggacttaagtctataggatattggaagtcaaaagaaaaagctaagtgttaaggaattacattgctcttttgttacacagcaacagaaacttggcagtagagtggccaactgaatgcagtcatttctgcggcgttgggagaatcccctgtgtgccactcatgctcagactgacagtcacactcaccagcatggctgtgctgcagttcatgccaggccatttctgtgtcctcattttcgacgttgatgctggcggaaggatctagtgcaccttcttccacagtgacatcaacatctctcagggcacatttcagttggtgaatgcttctattggcacgttctgcaacaaaaacctgatgaaagtcagggccaataaaatggtggtgctcacaggaatacttggccaaccaggcatcctcaaaaggagttttggggaatttatgagggagaagtagaattctagctctggctagctaaagaataacagaggagttaagagaagatggcattcatagttagacattagacttgggagtcactacagttcctgcttgctcatgacatcatgaacattcactgtatgcgactgtctcattggggtttctattgctgcaatggaacactatgatcaaaaagcaagttggggaggtgagggtttatttggcttacgctttcacatcatagtccatcattagaggaagtcagaacaggaactcaagcagggctggaacctgaaggcaggtgccgatatagagggtatggagttcttcttgctacttgcttcccctgatttgctcagcctgctttcttatagaacccaggatcaccagcccagggatggtaccacccaccatgggctgggccctccaacactgatcactaattgagaaaatgccttacagatggatctcatggaggcatttccttaactgaggctccttcctctccaatgactctagcttgtgtcaagctgacacacaaaaccagccagtgcactgatgcaatcagaaaagagaactgaatggcagagctccctttgtggtgagataatttccagccttgggaggttccttcttttccctaagtgcttgaaatttgcttgtccaacctagagctatgaggtgagtggacagaaccattctggcccagggaagccacattttctctgaagacttgacatccctgcctcaacaaaagaattcaaactgcctgacctagttctgatcaagagtggcacagctgggtgctcaaggtggcaacccctactgcacagtcttgactgactacatctcacttggttagtatgaaggaccaaccccctggagtcgaaaatgaaaacaaccagcacacaactgacaaacagtctctgatggaatactttaaggtacactgttatgatcactcatctctaaaaatagcctcagggtcacattgcacttcttcacggcccgaattctcattaacaggctacagtgatagctacatctcatccttagaaggatcagcagggtttgctttctctgtctcgcattgcttacttaagagctggacacactatgggagagaaatataaagaagtcagtggttggggaccgaccctgagactacaagaagctcctctacctattttccacctaagtgttcagcgtagcctccaaaagattccagaggccatttaactgtaatggcataaaaatgaagttggggagaaaaatgtgttggtaaagtgcttgctctgaaaacattaggatctgggtttagatcaccagcacctttgtaaaaagctgcatgtggcagagcacacatgtaaccccattgttggtggggcagagaacaggtggatccccgagggtcataagtcagccactgtagttggatttatgagtttcagtctaagtctcataagataaggtggagagcaattgaggaaagacattcaaggtcatcctcttacttccatgcgcacacacacacacacacacacacacacacacacacacacacacatacacacacacacacacattctaaaaggcccaattcattatcagtcatctaggaaaacattcatgaacatacattctacattttttctaatgtcattaacttttaagtttagaaccaaacataataactattacttaacagaaaaaaatactccatgttacaaaatatgtagcataatttctttacttatagaaacccaccctttacatggctaacactaaaaagaagcggcctcccctgtctgacatgaatgacgaaatgctattgtcttcatagtgaatttatcaccagttttccccatagcaacctgatttccacacagaccttcttctgaacacaggcctggtcttgactgatagccaggtctggtcccttcttaccccctctgggtttcagaaagtctagataagatgcagtcctgtttttagcaatacaagaagcaaaagtagttttctaaaactcaggattttctgaaaagacttgtcaatggaaaaggataatcaaagtggtctatgagatgcaatgcaattcagacattgagatttatgtccttaaatctataaataaagcacttgcctttacagcatccattaggaaggagacagagggtttgactaacattaaaagaatgcttcataaagctatcaaattacttcatttctaagacaaagaataattatttatttatacctactctaattgaaagctaagaagttacattaggaaaaaagggggggggatcctacatgaaaaagtgcatagtgggaagtccctttaggtatagttccttcatgatatcacaacaacggcagggttctgctttatgcatttcttttgtggtcctagggattgaaccctgggcctaagaggatgctgggcaagggctctgtcactgagcaacatcctcagactgcaggtcaacttgcaacaacctttttaatcttgtttctaatatttttgtttagcttttcagaaccataccaatattacatgctaaattgcatcaaaaatattgtataaaattacgagacactaagatcaacaattaacctccctcaaaaagtgaattttggtttattggctttgtctttgcaactactaattcagttgtaagggtcagagaaggaatttttgcaagatctacatcctaaaactaagatgaaggaggcaaatgacattttaaaatcattgtagtgtaagatttcaaagcacaataagtgttttcaattcccttagcagcacacatataatatgacaaactgacttaatccagagggataaattcagatgcttcaagacacatgaaatgccataactctttagtttgagccactgtaatggaacctcccataatccacttctcaccagatgcagctcactgcggctcacacttaggagaacagattagacgggagggtcccggtatcatttcctacctgctgctcatggcagcagttttatctaacaagagccagagaaagactatctgcttcctctgctctctgagaacagtcgcctttctcagaatacattctgatttcttctctccctcaataaccacaggctgtctataaacttaattatgaatctaaatgcaaacagaacctctgcatcctacagatcacatgaaaataaatatttctgcagcctgttttctaaacatcaatcaatacaatgagcactgaaaggtactaaagccaaagactaaagtccaagtgtgtcttactcattcctcagtacaatttctcttttccctacgttttaacacctggctcaccgctgagcttcatttcatcaattatgtgcatgcatatactgtttttgatcatatttaacacccttacttcccctcacccctcccactccctctagactccttcctactcccccaaaagtcttctactatttaaattggtttattttgttattgttcttctataaccccctgagttatagttaattagtattgcctgcatgcgtccggatgtggagctacttaggaacatggcagcttaccagtagctccaccactgaagaaggacccgcccccccccctcaggcaacagacccaccaacagctccttagctagaggtggcattaacatggatttggacaaacaaaagtacactcagtgtaagaccaacaactacattcatctaatcaattattaatttctacattttccatctgcctaggagatgtgaaagagaaatgacctagtgtcaggggtggggactcattctgtaaagtgcccagctgtctctgagaaaacatgcaatgaaccatttcctagcctgagatatgagatgccctgcagttcctgacacaagcttaggctaggcggacaagcaggaaaatgaaaccacaggaagacaagaaaaacgtgtctgttcatacttgactggaccacagcccagtttagaagacagctgtcatggtttcctagagaaccaacaggtaacaaaatcatgagagaaagagcggctcacccaaagtcagacaaagccaagtcttgtaagtagccagcacaatagtgaaagccattaaaagacctacacgaaaatgaaaaagtctcaacaaatccatgatcctaactctaatggctaaaaatgtgccgaaatacatggcatggcacaatagggaaagacaacttcaacaacagtgtaatcttcattaagaaagcagggcctggaagattatcaatgacaggtgtgagggagccaatctgagtctggtatgtctaccctgtggcatgcacctggcacctccttggcagcagcagggtggactaatgcagctggtccttttaccagtagataattgatcttagctgggctggcagaagaattggagcagaatcaccagacaatagagtgtgtattcataattgcaattacttttccttgagtctcttgcaaaggctacaacattgttctgaacacggtgctattggtgcttcagacctgataactttgtcataggaagctgactatgcatctttgccactgtccctggcttctactcatggataccactagcacgcccctcgttttccttgccagacaaattgttcctggttgagaagaatgaagcaaaacagcccctgctcagccttaggagctagtcccactggaaatgctgtacctaccaccagacacatcattacactacaaacataacagccctttgatgaatgcacagcatagcctgctgatgttattagcacttgtagggcagggtataaccatatcccacgactgtcaatgtaggattcttcaatattactaccgtaatagtaatattccttatcatttctaccttaagagtccaaattctgcatttagcctactttattgcaagtctagagcctgatgcagtatctagtctaggtccactccttccaaccttccagtgggcttagtgaactccatcatgacccaggctgctgagatgtgtgcagagtgcagagactgtctttacctgtggactcacatgaaaaccttgccatgcgctggtaatgtcattttaaagatgctgagaagaatacaacttttctcattatcccagtagcttgtcatcttctttccaagaacacaacaaagtgcccttataattctataatatggttagacacacagttatggctcagggtgactaccgtgaggtgtcctttctgtctgtcgttaagtcttgtcttttacctagtttacctcattagtagaggaaaaagaaaactgggattttatttatttgttttcaactatcctgggtagccttgaactagaactcctcctgcctcagcctcttcagcttagaatgacaggcatattccacaatgccttgcttattgatttttgttctagtaaagaaagaacaaaacatacaattaaaaaacaaaggacccactaaaaacatgaacatataaacaaaagtactcataattatttttacatcccccaaaggtgtacatgtacccctgtgtgtgtgtgtgtgtgtgtgtgtgtgtgtgtgtgtgtgtgtgtgttttacatacacgtgtgtgtggtttatatacgtgtgtgtgtgtgtgtgtgtgtgtgtgtgtgcatttgttgataccaaaggaggacttcaagtgttttgtgtgtgtgtgtttgtgtatgtgtgtgcccctacagacatataaatacaaataacacatggcaaagaataaaaaaaagtcaagaaaatacttatggacatagaaaagaagaaattaagtgtcataagtaaatctgagaaaaacagaaactttccctgaagataaacatgtattcttagtgggccaaaggtcctgatgacatcactgctagctggcacacatgcaaacctctcggttagtagtgttattacacaaccctctgcagatgtgaattcttccctacatccaagtaaaacacccaccaccaacattatctccagctttctccagctacatcaaatacaaaaaggaccttcctcaagattagtgttctgacctcagtgcccttctcactttcagtgtactacctcaactcatttgaatttcctaagacgtgagcacaatctttactcttcagagcactgagaaggtcaccagcactccaggtgacagagggaacattgggctcttagatgtgtttatgcttggctttcttagagaaagagcagaaggaaggaagaagtagagggagaaggaagtcaggaaaacaaggaaaagcacaaagcacagagtctgagcacacacctaccctttccctggtacctttcactcagtcccttacatacttcattgtcctggctcctacaggcaacaattctcacatcgagttcaaggttttaactttgcagacaagggagcagaaatccaaatccaactgactaacttgtccacggttgcacagatgctaatcggccaagccacaggaagttgagtgatctggctcttagtcgcacattctctcctgactctgtcatagtctccatgggttgcatctagaggctgaaatagcggtgttttgaagggaaaagggagagctgcatggagagtgtatataaaagagaaagtgtgtgttcctgtcaaagacaagcttgtttgaacagtctgcccactcagccaaaggtggacagcaaccatctgctcaggtgaaaagggcactgttgctccactgcatccacacagcatgctggaccaggaatgcggcatggctctgtgaggagggacagacaccacactgccctgcagcctcactcctttttagtcctggaagagcatgctcaaatgtgtagcacaaaaacattcagggtgactgtaattcttaatttcttctactctcttggctgtaacccagctggtttcatctatgtccacatacaattatgcattgaagtgctttactcttttatttcaatggtggaggtttaattgacccttcactcactagacaaccgctctaccgcaggaccacatatccagagcaatgcacaaaatttagatgggagtatgtattagttacttttctcattactggggactaaacaccttacagaagcaacttgagaagaatttttgactcacagttcaaatgtccttatgtatcctggctggtggcatagagtggcctctcagtttctggaggcaggcactctcagtctgttcacaccgtagccaagcaagaagcaaagcgctcagcctcctgcataaacctctcaagtaagagaaatccaagtgtgtgccacagtttcttccccgacttctcaccaaggccacaggcaacacaaagtaaggaatacctaggaaacataatctacttgataaaatggagtgatgctaggacactcaccccaaacattctacaacctcccaaaacagtgccaccaactgggggccaagtgctcaaacatgcaattttgtgggggctataacagaagaagcagatgcatttgtacattccctagttataaatgtctctgagcaactgtgtaccttgactgatgccgcctaagtaaacagacacctaaccacactgccaagaggcctataaaaccccttctagtcccagattgagttctgtggcccccaggacgccagcgatatgctcactttgactatgctggaaatttgaatgttcatatggctagttcataaaaatgaagagatacttattttatagtctcaggaataaaagaccaatactttactagttttgcagtatgcgtgaactagggaagatattttataacacaacttttaaatattggtcactcttgaaataacaaatgacatcatactcaccacagtttggctattcagaaagaaaagtttactttaaagggaattattctctttgacagtggtgactgatacttgactctgctcaagtccagggttaatcatgctttgtttccttccagatattgttgtctatgctaatacaattaagaagtcactaaatcagtaaacaatgcatcctgaaaaccaggagaaaatcaagttccacttcttaaatcattgttaaaattatggcttaattgttttcaaaagtttatcttttttctatacctcacatttgccattggtgaaatgttttgactttaagtggctatagcactaattatataaaatttacatttattttaattagaaattcatgttataatgactggaagcagtagcagcactactacagcatactacctattactacaagatttattttttatggtgctgggggttgaactcaggaccttgtacaggctaattaagagccactccatcaagctaagtacccacttctatcaaactagcttgaaattagacctatgactatatcaaaatgcttaatattaaatcacccctcaaattgtggggatcagatgaaatcctgaatgtgtatatttgacatgagcacagccatatcaaggattccaaggcctcagacccatcggaatggcaaggccttccctgtagtcaggctctgcagaatagcaaggcttcccctggtcaaagtatgtatacagctggcctttatctaaaaccagtacatgtaggaagtccagaccacagcttcctcatcccagatgacttccgccccagactgctcccctccagaaaccccctactgctgagtttccagactgcgttgctgtttctccatctgactccatggcccattccatcccagctggatgtttcttcatttctggcatttcttcattccctgttgccccagtcagatcaaccacatgactatatcaaaatgattaatactaaattgtaccccagtggttaaataaaggcccaaaattatgttgcagaagtactggatgaaacaacaacaaaaaaaatcagaaaaactttccaacctaaaaattacaaccatttatatctctgagcacagtacttttcttgattccaaataaaaagttagaaacagttacttgagtacccaacaactttggaactatcaataggctgaggactgcatttaattccttcatcctatactttgaacactggggatgctgacaatctacaccaccaccaatagatacagccaataaacaataggcctacaaagtcaagagtcatcaggaaataaactttccagtcttcttaaaaaaataaggaagcaaatgttaggggctaacacttaagtatttatgtgtcagacattagttttcacccatatctgaaaccacaacaaattgcaattgtgttatttattgttttctcattaacccaaagactccacagcaatagggactcattgcaaattcatgacctagtatgaacaacccaaatcaggcactcaattattatttgcagaataaatcaggttacaaataattcaaatattttagctgttggccattacctctaaaaatgcagaataggaaaaagtgcgtcacaaccaatagaataaagtctttagtgaatttattactttctatgccccactttactgtatgcccatctcaccttccttcctttccacacgccagacaagcatctaataatgagtcacattcccagcctctaacatgcatgtcttgctatggatgaacgcctcttttaagatctgaaaatcctctgctttatgttcactatttattttcttcttcatttgttccccacaaaaatcaatgtgtggttgacactacaacttcaatataacaaggactcaagtttccagagaatgatatatatatatatatatatatatatatatatatatatatatatatgtctctggtattatgttcagaaaaacgtgacttaactaaatagggttttgattatagtaattgtgacttgattaataagaatacataggttttgaagatggataggcctgaattcaatacctgcctttgccactaaccatctagctgtgtgggttttggcctacaactcaatctctctgagctttgatttcttgacatgtaaaatgggaacacttgtaagataaagttttaaatgctttggctatatgaaaataacgtagataaacaaatatcgtattatttcaaataattggtagttgtttttttttttttctggtctaagaaagattcaatgtactaaaccagaatttgaattgtgtaaaaaatatgaatgagaaatttattgggttaaacatctaagtatagtaacagggtaaaagaggcatagagatgcccacaagtttgtactggcactagctgacagacacctaaatcaagatgtaggtaccctgttgggtcaggttaccagaaaaagagctaacagcgttgcttaatcctacaaccaaaatcaaactatttcatccttaagatcagagcaacatccgtcttctttctccgcggcctggctggtgctcaaggaaagtgttaggaaaaccacccactactgcccagggtacctaggagctaggcactgagattcggagcaactcaccccggagactccgttggtattgccccagactgtcctccagggtagagttccctggggatttcgccatggggtcagagatgggagttatgcgggaaagtgtccagtgcacccctccgaggacaggcctagcgctgggggttgggggatgcctgcctgcttcctgtcgcggctgtcactagggagccaggaaccctggaccgatctcctgggggctcttcctactccctggccctcatggtgatcttcgggagttgtagttcgcaggctgaaagcttgctacttcgagagtcctatgagccttccagcaacactacgattcccagagggctatgcgctcagggcgccactcaggcagtttagcggcctgagacggttgccaagagacggactggcaggccgcgccctttccctctgcccagcttggattagttctgctctcctgccatcctccagccacctggatcgacccgctgacagaaggggcccggtgaaggcccctccaaaatgggtcgttgtggagttgatctctaagcccgctcagggattcactgtaaactctgtataagttaggatgtctgtcaaaatcgtttttctctagaaaatgaagcagaaaatcttccaaacagccagattgtgaaggcggcggacactacaactcctagaatgcccagcgccccgccctccgcgtggagttggcgcgctgcccgctgggaatcgtagtccgggttggttgcggtcctactccagccaggcagctcttcattgttccagcagcgggtctggagggcacgcctgcgcagtgggcggccgggcgagcgtgtggctgagaccctcctcaaagccccctttcattgtctgggtctggcgcctgcgcagtaaggcatcgcccggcccggggaaaaaggagggagagggtctggctgcttgccctttgcgaggcgcctgcgcactgggccgccgctcgctgccgttcccgctatgtgtggggcgtgtgtggaataacgttattgcccggcggaaccgagggggcccgagctccgcggcggcgacgacgactacggcgacggggtggggggaggacagcgtggcagagactgacgggacgcgccgcgccgcgccccgcctcccggtccggtccctctcggcggtgaggggtaagtgatgcgctcgggttcggagcggcccgggattctgcacatcctcgtccgccgcctcctcctcctcctcggctgctgcggccggggtcggggcgcggcccgcgggcccgagtgcgaggggcgctgcccgggacgctccgcgcggccgccgccctccctcccctccctcccccacgggctgcagccggacgccccgggccggcttcccttcggcgcgccccgctgctcttctgctggccccgggctttgtgcggcggccgccagaggcgtcggcagtcgctgcgggcggagcgtcgagggaaggggccgctcggccgctggggaaacgagctctcccggggcgcccgtcccttttatgtagggttggtttcggggtgtgaggctggtggcgcggggtgcggggaggtcggacgacgggacgagcgagccttcgggtggcgtcgcgagggcgtggaagacgcgctgtcaggcagcctgccccgcgcgactgcaccccacgtagcctccggccctggtagcaatccccgcgggaggagcgagtggcttcccgtgggcttcattgtcccaagatccagttgtggggtttggatctggttcccttccgttttattcgagggggtagggtggggtggggggagaaacagcagctgcgtgacacggaagggaagacaaggaaatgtgtcctaagtcatatgatctctgttttctggtcttgagtagtttcactgttttttttcttcgtcttctttttttttttacccccaaatacgaagaagacaggctatacctgctagagtccgagcctgcctaggtgatcaatataaaactactaggtgacaatgaaggctgggctaggtagggcctaacagcgaagctgttgtttagcagggaaatgaaccagcagaattatttttttccactgggtgggtgatgcgttcatgttcctaagggaatacattaggatacgctgaaagcaaacaaaacaaaacaaaaaaataggccgggtatatttcagtttctgaaattgattggtttctattaggttaatgaaaattcacccgccggagaggattttgttgatgcagacaatacatttggttgaaaaggcatcctttaaaatgattcgaatcttaagcggatggtatttgcagtgctacgccaacctttctgcttagaacaagcatctgataggatgaagcaggatgaggcggggcaggtggagggatatgtgagagttacattataaatatgtacttagccttcagagacctaggaattcagcactgagaaatagctagtctttttgccacagtttttatttttatttttttaaaaataaagtcagggatgcttttagttctaactcttgtaagtgctataaaactttggtgtcctaaaacaagacttaagtgggcttaacagaaactaagacgaagctcacactggcaaagtcgggcccccttgtctgcctccctgaagcaatggaaggcagagcccaacaaaaccaagatctgtactgttgtagtgtgatctctcatatgtgtgccctagtcccctgccctgcacaaatacatagaacattttctacatgctccttgagtggtcttttttctttttaaaaccctattctcaacagttgtattagtttactccttgtattataaattattaattatactgaagtggccttttgagttacagattaaaggaagatgccataacatgtgctttttgtaaaaacagactggcttccctacttattaataacctgacatccaataatattttacagtgtggtcaactctataacctgtgttaaaaataaaatttacacacaagagcttaatgatgtttgtttttctttaatttgtgagttatattctcaacttgtactagaacttaccttttgataatatattttgggaggcttattttgctataaaacggggcttttattgaaatacaatttttgttctttctgcttaaatttaatgttatttttagaatgtattggattttagccaattttttgttttgttggtttggggaggcagggttcaagacagggtttctctgtgtagccatggctatacatgactgtcctggaactccctctgtgtattccaggctggactagaactcagagatccacttgcctctgcctctctgagtgctggtgtcacaggcatgtgcaccaccacccagctttgttacttgatttttttagagacagggtttctctgtatagctccgactgttttagaacttgctctgtatataggctggcttcaaactcagagatccacctgcctgtttcctgagtgctgggataaaaggtattcgacaccgtgttgggcttagatttcagccagttttttaaaaaaattcataattaaattccatatgtgagttttagtcagtaaaaatttaaatatattttactaataaatttcatggtatcctaagattattttagcattagaataatgaagttagacatcaggtggtttttaaaattccgtgcttagtaatttgtttcacttactcatttctttttatttacggggggggggggggggggtcaaaactcagttttaccactgcatctgctagtaatcattgatggtggtaaaagctctgtgtttgagcttcttatctagatgggtttactgtgtgtgtgtatgtgtttacatgtgtcagagcatgtgtatgtgcttatgcacatggaaatctgaggttaaaatcttccttgactgcttttctacattgtttattttgaggcagggtgtctcttgttgaatccaaagtttatgggtaaggttagtcttactagccagcatgttccagggatcccatttttaggttttaagactaatacacctttccacacaggtctccatactcactcagcattttacatggcttctggtgatctaaaccctgtctgatcttcttgcttacctggcagttcctttaaccagaccctgtatggttcattcactcaacaaaattctgttctgataaatctgtttactatctaatgcatactgattttttcttgtgtcttaaacatcagattgttaagcaatgtactattctaataagaatatgataggtgacgttaagttgtaaatacctttctatctgtgttctgaattagttatatgccaccaatgtttgacgagtagttaatgattaaagcattaaacattgatctctttcacacaaaaaatggggtcatgtttagtggggtaaaagcctcaatccatcttttctcatttaattttcctcaacaatggagatttctaatgattatccatggcaaagtgagctttggtttatttgctctagtgttttatgagggatgtgttcagtaatgagttcactttttgtggtataaaaagaataagaaaacatctgtgattgattaaactgtctatcttaactggtttggttgaaatgattgtgcaacagcatatttctttgctctttttttttaaaaggcaaaataacataaccaaatgtatgaaacctgtttacatgtcaaataaaagcatataagaaactaacaggaagccgggcgttgatggtgtgcgcctttaatcccagcactcgggaggcagaggtaggcggatctctgtgagttcgaggctagcctggtctccagagcaagtgccaggataggctccaaagctacacagagaaaccctgtctcgaaaaccaagaggaaaaaaaaaaaaaaagaaagaaaatatttctcatagggggcatagtatttctgataaagtgaataattcctacactgcatggaatgcctactaaatggcagttttgcaacatttttctttatcaaggtattgtgtaacacatttaaagttgaaaaactaagggttggagaaaagcctctgcagttaagatcgatagctgctcttgtggaagatccaagtttagttcctaacatccatgtggtggttcacaagtgctgcaactccagctctagggagtcaggtaccctcttctggacttgacaccaggaacacacatggtcaatatctctgtaggtgcagttaaacacataaaattttagtaagctcttttaaaatgttagaaaaactcgaagcacagaattagttaatgactgtttctgtgacacacattgcagaattgttgagtctgtaactgaacctttgtctttttgaccaaagtcaaaattcttttgacttatcttttttgtaagtttaagggtgacacttattgtcttactgtcattaataaaatggtagcattggaagtgttttacaagtcttctgtacagtgttcccacacattgctaatattcttgagatccagcatttccatgaactcttccctagacttgaaaggaaacccatttaactttcagaaagtttaatgaaagattgttaccagagttctaggccagaggagttcccagctaaccagattgagccatctgctgcatggggaggagagaggagtgaggtgaaatcagaaaggattgtttttcagtgtggctacactagcaaggaacaagagaaacagtatactaactaacccctgtcttctggatacattatataaattaaggaagaagtgggggccaggagcattcataatcaaacagcgttagctaaaccatgatctggttgatcattatttgattctgctgggtccggttggcaccgggaagtcattgttgcttgaagggacagctcagttccttttaggagatgattggtcctgtttaggagagcagtctaggatcctttcaggaagtagaagacaacagggctcagtgttcctacaattccagtgtggaaaagggacccttgaaagaataggctggaggagcaaaatgagatcaattgggacagtaactgtctcttttccagggtagcaaaagataacttcaaatgagccttattacaattttaatgtttatgtaagtggcatttattaataatggcttttgttatgacattttcatacataatatatttgatcatctcgctgtctctgtgtgtctcgtctctctctgtctctctctctttctcttacacacacacacacacacacacacacacacacacacacacacacacacacccaagagcactagaaaggagcccatggaggaaaacatgatcctttaggggacagggaaggtagtagaacatatgtgagttagaaaggttagaaccctggaggtggagaggagggagtgaagacaaagggatgagggagaagttgaatagaagtgatagtcagccataacaagatatgaaaaaagcccgaaatctagggctggttttgctgtctgacttattcctgttagttctgtcttcagaacaatacagaaagacttttctcaataaagattttcaaaattaccattcaaaacttcacattatgcagcttcctccaccatgtctctaccagttgatttgagacaattgagtcaatgctttttttccagtttaatttccatatttaattctgcagttatggtctggctgtacagtgtagtgacctattgcttatttaaagccatgtgcttttgttttcagtctgaagctgtgtcatatctttagcaacagtaatgttttcctaatttctgagagatggggagggagtggggtcatatggtttttaaaagttaccttcttgtaattcagggtgagattctgtacttaggcttttttaaaaggttctttcttatgaacggatactattaataagtggtaagttgtctttgatactagttgtgtgttttgttttattctagtgtttttaaccattaaaaagtcagcagccttatggttctcattttgctttttgaaatgttttaaaattactgatgcaatctaaacatttatctaggtctcacatattccatttataacgtaggtgatatttttgaaactgaattacctttacctgctactaaattttgtctgttttaatattactgtagttaaaaatctgtttagattttcttgaattgtgattctgtcttgtcatctaggggattagcttcccttcctggcttttgtacatttataaatttaataagccatatctctattgtcgtcatccttcctgtccatgtatttgtcatagccaaggataaagccatccagatttataaatagaatcaatgctacacaaaatatgctgggggtggataagtgatacagaggtaataaaaagtatttgtatagttttagtttgttttttttatttccctaagtaacagaggaattggatgaatctaggagtttggaggatatggataataatattatgataataaagctgagtaagggaaagtgtatgaaaaagagtccatcagaacgaataaaggcattgctattgttaaggatgtgacagaacttttagactaaatggcttgaaatgaggacaacagtagttacaactgcatttatactgtagctgaacaattaagcatggaaactagatcagaatttaaataaaatggcattgacaaaacttatggccatttgacagaaagggaaagcaaaagaaactgaataaaattatcaaaattaaagagagtcagtgatggtccacttttcttttttaatttttaagatgtcagtacatacaaatggttccaatagtcaatgttttattgatggtatgtaaattctttttatccctgttttataaataaagaattatctctttctccagtgccattaagcaatttttttttcttgtttgtttttcgagacagggtttctctgtgtagctttggagcctgtcctagcactctctctggagaccaggctggcctcgacctcacagagatccacctgcctctgcttcccgagtgctgggattaagggtgtgcgccaccaatgcctggcaattttagtatattttatgtattcctcaactcaaacaaataccaatattatcagccctctttccatctttgacaggaaagaaagcctcactacatacacactatcttgaatgttgtcatttctgagtgtttaagaagtcagtcttcaggaacagtgttcgtcatcccacctcacccaaggtgtttaacattctggcttaggtagagggggcgaggcatgtaggtatctgggtagagaatattctcacatgcagtgtgcttctgcaaggaatagggtaagtggcttagagaacaaagagaccactgtgcttgaggtgagtgagaggaaagaagagtaggaggaattaagattggagggagcttttattggttgatgttatttaagtgccgtgggaatttattgagggctttgaaaggattgccctgttttatagatagtggctagaggggagaaagtatgggaataagatgaactaagaaataattggagtgatctagactaagtttgtttagagtaactgtgatgatggtaatgaaagttgtctgtgtttggctttacagaatcaggagttgggtgtgtaaagttaggaatctttattggacatcaaagtaaaatgtcaggtaggtaatgggatctataagacacaaattctgaggagaaggtttaaagataaaacttaactacaactagtaaactagaagaggccactaaggtaggaaattaattaaggtgctaagagacccaacatttgtatgctgctacattggaacattagcatcaggaaagattgaaatttggtcaacagtgtgagaaaaattacaagtgtgtggtgccccagattccaaggaaagaaagcaagtttgaaggtaagagtgttcagtcactgtatcacatttaatcacttgaatacatcttaagaaatatagtagcctcccactagtggtctctgaacaaatgactttaatagacctcccttcattcttaattattaataagaatgcttgcaaccattcttcctgtaaattagccgcctgtatctctgaacaatttgttcacagataggacattgctgattttaggtagattggcagtgatgttctgtttggtaagtactgatcaggtggtgcctcagtgttcctagttgtgtgatagtgagtctctttatcccagtttcatctgttgggttcagttactgataggctactttcttagaggcttattataaaaaaaaataaatgaaatgtttaatcacagatagatacctctttcctaacagcctcaagtagtttgccacctcattattgttggatgtgaggaaacacattggctgaagtaaaaaaatacttttcattaattctgtagaagtaatatttacctcttgtgggttctgtctcactgggcagttttgcataccattttatagcattcttgtggtgtagagaaaggggcatgatgccaggaagaagaaaagaacaagcaagctttgagaacactttgtccagtcctcaactaatccgatccaaactaaccttattctgttagatagtcttctggataaaggcttgttacatgttatatggaataaaggatagcaaattcaaactttaaagcttaaataggggtcttgtacttcaggcaaagagaatactgatctgagaaaattcaaggaaaggggaaagagcctacttgaggagaaaggcataaagtataaaatattcagtttgttggaaagcacattggaaatagaaaactttctatggtgagcttcatgagacagtggtaaactctgtataacatgtgagaggcgccatctttgctctttagggtcataaagcagaccagcacaccttggtatccaagggaaattaaatcttccaatgcttgagacctttaaataaaatggtatatcatttgcatataatccatcatcatcttcttacatacttagagaaaaatgtacatttatttatgtgtgtacgcatgtgggcacatgaggaggccaaaggatgccttggaggaatcagttccctccttccactgtgcgagtccaagtattagctctggtcatcaggcttggcagcaagtgcctttgcccactgagccctctctgcttgatcctcctatgtacattatttaagttatctctgtgttgcttaaaatgtctaataatacaatgcagtgttccataaatactgttctctatcgcttgaggattagtggcaatgaaaaatgtctatatatgttcaaaacaggcagagttacactctccttccagtatttttcatctgaggttattggatccatgaatttggaacccataggagtatgtgtttgtacgtgtccatatatattttgaagacttcactgttatgtgccgtggatgttcaagagaaatgtttctcgtcatacaactaacacattgcaaagtaaaggctacttactgttttcttattcatttacagatttaaagataattcttatacattgtggaaagttatacaagtgttgttgagtcaaaaagcacacattaataacaactcaccagccattatatctctgtcacatatggtctattcttaattaatttggcgtgattctatactggggttagattttatgactattttatttaaatatttttagcaagttggaaaaatataaattttgtgtaggaaaaaatcttattttaaaattagtatgaattttagaattctgcatttgtatttgcattggatctaatacagttctttcaaaccaaaggaaaatagtgatttccacaaagactagaattgtccattgtaatgtttatagttttaaaaacacaatttacataaattacatgtttgataagatgaactcaagagttgtgaaaactccaaaggctattatcaaagttctatcaggttaaatgcctgctgaaggtcttttgcttagaagagaaagcaccatctaagcatgcagtggatagatgagcaagagaatcctccctcacgttctgaagtcttttatatgagtactgattcttttccctcccaaaggccacatctgtcagttgcattggggatggactttcaacatgaattttgatagaggtactatattagttattttccccattgctgtgcccaaatacctaaaagaacgaatttgggggaaagtttcttctcagttttacaagatgtagtcccatcacaggcagaaaacctggtagctgaaatggccagcctcatggtaacagaagtttagggtatgacttctttatgagttggcatattggaaagcagagagttggatcataaacaggaaaaaaaccctaactctcaaaggccttagtggtctttcccatctagaccccatgcctcaaaaattttcatgaactccccagacaatattcagacacatgaagctgttggagggcatttaagattcaatctgtaacaaatgccttcatttaaactatagcataaagtcaaagaaattgaagggtatgtaggccatgcagtggtatatgaagattgggacaagaaaaagagaagagggttggacaggaggaaaagaaggtggggttgaagttcatttctttgaaggtaatcagttttgttttattggcaatagggttgacagtgatttcaccctgggtcagtaattatttcctgacaagaattgttcttaaaattattaatatttggggctaaggaaatggctcactgacttaagcactttactgagcaagtgtgaggactggagttcagattcctagaaacttacataaactctgtgtgggtatggaagtctgcttataattctagccctggaaggtgggatttcaaaaatagccatattgttgaactcttgggtttaaatttgaaaccctgcttcaataaataagatgaagagcaattgaagatgattcccagtaacaacgtcaggccaccatattaatgtgcaccaatgtgcattcacatggacactatataaatgggaaagggggaaaagtaacatttccccaattaaaagttatgataagatacatattacataccatttaccatcttaagcatttaagtctagtaaatatacacaatacagtacaaccatcaccaccgttcatgcataaaactgaaatatagaaatattaaccagtaacccgttcagtgttcccatccccagaccctggcaattactatgtctctgatttctgctattgaaagtaccccatatagttgaagtcatatggtgcttatctttctgtgaatgactcttttttttttttccttagcttattgtcttcaaggttgatccatactttatcaggcatcaaaattctcttcctttaaaaaaaaactgtaccatattttgtgtattcattcatctgcccatgaacacttatattgtttcctatgtattgagtattgataacagtaatcatttatataagttagctgttttctgcctcaaaattacagaagttgataccaagtgaaataatgcatccaagaacatacataatacatacatatattacatccacatattttgtgctggctgtgtttggagattatccactttaacaaaatctctgaatttcatcttctcaaaagttatcacatgtactgtttccaatgaattcgtagataggtacctgatagattcaggcaatgatgagcctaatcaccttaaggtggagagccaaaagaatacagtctagtctgtgtaagaacatactaacacagatgattcagagcttagctgaaagatgggggttcatttgttttttaatttactaatttatttgtaaattctttgctgctgcctttagaaatgaaagcatgaagctcttcatcctcttttgattatcagcttatccatattgcctgctacagatacaaaatacttaaccgaagccctccttcatataaataagcatgtgatttctgttgtagagctgccctgactagagtagccactaactacctgtttagcaaaagttacacagttctaaagaaatataaaagtgagtcactttacatttttcattagctagcacagaaattgtggtaagaagttttaatgccttggtcatgcaaaggtgtagcccaactattcattgaagatttaataaaagtgattttatgaaggaggtttattaagttgctggcttctcttaccaaatggaagttttcttttgaaaatgtgtagttaatagcctggtggttgtgcgctcacctttaatcccaacactcaagaggcagaggcctgtggatctctgtgagttccagaccatcctggtctacaagagctagtttccaggacagcctccaaagccacaaggaaccctgtctccaaaccccccccccaaaaaaaagaaaatatatagttaaagttagatactacatgaggcttgatgcttgaacttagggaagtaggactttttaattttaatgctacttcaaatgtaagttgtagatttcatttaccctagttatttatgttaattgcttttaaagaagaatccttgatttatttggcagataatatagctaaaatatggagcatttattccaaaatcatcatgaatatgacagcaattttttgtgtgcaaaaaatattcttactgctgagtttttcacatgagcctggagccagtatcttggtaggaatccaaaaacagcacagctgcagatttattttttgtgagtaactgtacaaatcagggtggagtttaaatgaagttttcccaagagtgtttttcattatctgtcccaaatcaagtcgtttgtacagcagagttgaaattttcaatgttgtatggctgttactttctcagagacacatcctctaaccatccagtctaaagagtaccacgctaagctgttacatcatccttttctctttggtttgttttatttttttcctcctccactgtcagggaagctgctttagtttatttagccatttgtttatttttgcgtctatgagattagatcctttttctgtcttgattctctactttgtcccttatatctagaataatgctgaagtattgtttggaattgatacatgtttgtgttcattttcaagaaaaccaggagtttgttaagacaatatattatacttgtatacgttcatttctaacatataaaattcctagaaaaatggtaaatgttaatcagagctattctgttatattacagagtcatagaaaattgtgtctatttgtttatgaaacccaggttgcatttgtttgacccttagtccatatacaaaatccagctatagctatttcttccattttcaaatacatggtatcaaaatcaaagagtttaaatttcaaatgtattttctgttagagcctgagttcagggccagaagtgaaacaggaatctcaaatttgtacatttaaactttttctttttttaatgtttgacaagataggggaagtacaagttataaagtcttgtgagataggcctggcattggtggcacactcctttaatcccaacactcaggaggtagaggcaggcagatctctgagttggagaccagcttggtctacaagagctagctccagaacaggctccaaagccacagagaaaccctgtctcaaaaaaaaaaaaaaaaaagtcttaagagatagttcatgcagtggcttattacatttgtttagatgtgagttttactgatggtcagaggataaatttggaaggtgaaatttatcactttattcccctttgtttaaattttcatttattttgggaaaatatatatactttgcaaagagggagtcagtgggccaagactttagaggacattgtctctcatacctcctggtagctgaaaaaaagttgtcacatagtaaatgataatattttattaaaataaaaggttagaaaacaaccccttccgctctgaagactgacagccagctatttatttctctgcaagagcagaaattgcaaggtaagatgagcattattccatgtaaagccatctggtgatgaatcagccagctgatttccagagcataaggatggactatccttaacatgtggcttagctcaagtaattgcatgcagtaattatacactaggtatgtaatgtaaggaagccagttttttgccatggattgcataatgcactgtttcctagttctgtggtgatgctattgtccatctcaaaactccattataataatttgcattactcagactcctcttgacttcaattctcaatttgaattgcatgtaactacaagcagcattaaatatttattttttaatgaccatacagttaatgggtttccctctggcattttcatatatactctttttgtcattggctttctgtatgtatgtatgtatgtatgtatgtatgtatgtatatatacaacattctgcttccatgtatatctgcacaccagaagagggcaccagatctcgtaatggatggctgtgagccaccatgtggctgctgggaattgaactaaggacctctggaagagcatccagtgctcttaagctctgagccatctctccagcccctgttttctttctttactcccctctcccatcccctttttctctacctcttaggtcccattccacgtttttaacatatactctaataacccctttcccctcttctcccaaagactcctctccccttcatagtcctcctcccagtctcatgagccacatgcacactcacaaaattaaaatttagaatccatgtgtgatagaaaatatggtatttttttctgagtctgagttactttcttattttttatgtatacattttgctattttattaatttttgagattataatattacattgccccctttcctttttccctctaaatccctaccatatacctctctcactctccttcaagttcatggccttttctttcattaattattatagcatgcatgtatgtatatgcgtttatattcttacatataacctgctcggttcctaatatttcttgtatgtttccagggctgtttggcactgcatatctaaccctctcctactcccagctttcttcagttgatagagtagaggcgcaaagggctcccccatccactttgtcattttctaaaaccttgatgtgtgttattttgcttgattcaccttgagacagagtctatatagaacagtctggtcttaacttagagatctgccttcctctgcttctgcttctggagtgttggtattaaaaaggcacgtgccaccactcctgaccccctttcctccccacaaaataataatgataaaaatataaaataaactttgctctcagaactgctttagctgcgtgctagattgctagatgttattatggttgcactatcattttcatttgattctaagaacaattaacattttaaacataaaattaaaacataaagcattgaagtgtacaggacagtgaagctgtgctcttcttgacagctgcagagaaatttgattggtctatttttagacttcagggtttaagtattaaaatgctagtccattggatcctaagatgaattgatcccactggaaagtcatttttttttttttttccgagacagggtttttctgtattgctttggatgtcctggaactctctctgtagaccaggctagtctcgaactaacagagatccacctgcctctgcctcccaagtgctgggattaaaggtgagcgccaccgaggcccagccggaaagtctaattttaaaactaattatagccctaggaaggtgaaagtgtaactgtggtgctatgtagtgtttacatctgtctagcttccaaagtttgaatgttaaacttttgtcatctagttgctggaaagccaggtcctatggggcaagagattgctaaagaggaatttaactagaaagttaggaccagaaatactcagtaacagaagttaggtgaccctagagttccctgttacctgcttgtcaagacttctggtagagtcatcactgttccttcatccattaaaaatggcttctggctgggcattggtggcacgcacctttaatcccagcacttgggaggcagaggcaggtggatctctgttagttcgagaccagcctggtctacagagtaagaagagtgagttccaggacaggctccaaagcaatacagagaaaccctgtctcgaaccccccccccccaaatgagaatggttgtcaattatggtgggtgaaagtttgttctagactagcagctagagatgaagaaactcttttggccttctactaggacaggtgagatcatctcatgtcctcattccagtttagaataaggacagcttcctgtttccatctaactgcgcagcattctctacaggacttagttccctgaagcaagattcttttgtttgtttgccctagcaaccctggatttggtaggcttctcaataggtatgtatatatatttcagtatattatatgttttaatacatagatacttggtatagcatttaaatgagtttaacttgtctgtctctttaacattgatattttttctagtgctttagaatttatgttatctaaagtcaccttatggaaataacatatcagagcttcttgcttccattgaactgtaaattaattcatgattgatcaaccagtctctcctcatcccccctttcctggccattctcagattctagtatccatcattatatcttctacttctatgagagcagtgtttgcagcttgtacataccagtgagattttataatgcttcctttttatgtgcctagcttatttcacttaacccaagagcctctatttccatcagtgctgtgtggaatagcaggattttttactttattatagtagaactatatagccttcatgagtatgtgaatgtttgggtttgggttgttttgtttcatggctgttggggtttcttggctgcaatacacttggaaatgcaaatgcttctcccatcgatctcacttcctttgtatataaatacacctgtaaatgaggctacagcatcaaatacagtggctctattattaaatttttaggaacctacataatgtttttcataatagctgtgctaatttgcattcctatctacaattcccatcagtgcttgtggtgttttgacagtacctattgaatggattaaagagttcatattggttttgtcttcatttcctggtgtttactgctggctacttacttgttttcttttgagaaatgtctgtttgggtctattgcacaatttgaaactgcttggcagcccacatggatgacctgcctgtaatcccaacactaggaagtacaggcctggggtccctgggtagttcaactagctggatcagtttcaggatcagcaagagaatccacctcaataaatagtgatcaagagatatccaacatccacttctgatctctacatgttctcttgccacataacctatacatatagatataccatatatatacacacacacatgaaaaaagaaaaaaaaaatgagtacttggggaatgatagtaaatctaagagatactgagagaaaaacagagaatgtagctttatgctatattgcattccccagaagaaaagatatttagtggactcaaggtcattgccttagccgacaaaatgcactgtatattaaatattacatttttgtttcattttagaaaatatgtattctctaaacttcatgaaaagccaatgagatttataaaaagccatttaactacattatatatataattgtgaaaattgcataaatacagttatgtcaattatatagttataatgtgtcatgctgtagaaatgtttaaagactatcttattgcaaatgagaattaaaagctgttttataacataaatggtgattgtttaaacagatttttctacactaagaagttggtttttttttttttttttttgtccatgtttggtccttgttttaaattactgttgaagatgaattgatttcctttgaatatgtcatactatagtttttgtttttgtttcctttaaaaagtatgtaactattgacctacttaactattcagagttttaaaaattgttcttccttgtaaatggagtatgtaaattatgtgatatatttatgtaaaatattttcctttagttaagttctggctatctattgacagggccacggagactgtattctgaagtagtgaaagaaatgctaaacacccatttgacagaaagtataggactaagatcaactgcattgaaaggttgggtagctgtgagacttgataaaccacttaagtagaccaatctgattgtataagctcaggaatattaagacttgattgttacaactttatacataatattataataatattatattacatagttgtgtacatcgtgtatgtgtacatgactgtggtggttaggtttttttttttttttttttttttttttttttgtcagtattacacaaactaaggtcacctaggaagagagaacctcagttgagaaaatgtctccatcagactgtcctgtaggctagcctggggagcattttcatgattggtaactgatgtgggagggcctatcccacctatggacagtgtcaccctgggaaagtggttctgtattttataagaaagcaggctgaaaaagccagtgtgacatgtttcttcatggcctctgcttcaattcctaccttcagtttctttctttgagttcctgacttggcttcttctgatgatccactgcactctataagccaaataaacccttttctgcccgaaatgcttgtcattatgatattttatcacagtaacaaaaaccaaactaagacagtgttcttttaacataataaccaggattttcctcagaacattgtacaatgtttggcttacatatgcatctattttattgtagaatgcttccttccattatagtttatttcctgttcaagtgcagcatagtatacatcttaggaaaaaatgaaaatattcttttggattcctgacaaaacttgagtaggtggtatcatgacttttaagtataggagaggaaactaaggaacatgacacaccttgcctaaggctatgaagagtaaaaatagtagaacaggattcagactcacccattgatctgtttgattcctgagcttgaatatgttactgacaatgctacataccataggatttgctaaaatctcagtctccaggtccttgggactccatgaaggaaatcctttcaaggtccatgggaccagatgttcagtgatatcaaaggactttctgcctctcttgttgcatttctattagcacacatgacacaaaaacaactgtggtaaaagctcagtagaacagattaaggcactggaccagacagtaccaatagtagctctagtcatcattgttgtttagctgcaattaaatccttttcctaagattatctcacagaaatgtaacagtgggtgcctatctgaaagcttgaccttgaattcatacctttgtagtgttctcagatctagaggaacctacttacagaacagttactctctgtgccagactattgtgtttgtctgcaagaaaataagatgtgtcactatgtgaagtgtaagctaagttagacccatgctttcgtaaaacatcactttatgccaatgattggcagattgctaaagtagagctaagtatttgtcaaaatgaaccttaagaaaaagtgacaggattttcttttcagtggtaaaattttaggtgtcaaggacataatttgagataatgaattcatcccgtaagcttagtaggaacctaataaaacttttctgttgagatgggtggtaatatttaatgtgttttaaagtagtgtgaattaaagagtcaagcattttgaagatctacataattctgaaaaccttaatttttttcaaaagatcaatgtatgatgttacagaagtccatctgagtggaagatgaatttgtgcataattcatacagcacttccatattgtatacaatcaagaaactttgccttgtatattttaaaatgccctacagatatattaaaagactttaaataaaactcccttttaccccccttaaaaccagctttcctttatattttctagtttaaaattatggtagtagaataaatgcaagatgatgggggaaatttttctattaatacagatgtctaaaagataacccatattttaagtagtgctatttttgtcattggagatggggttagaaaatgaagttttctacaaatattagtaattttaagtgagatttcttattattctttcaaatgaaagaaatgctagtttttcaggtatatcataacccatgtaagcaagtactcccaggggtccttttttttccttttcttttcttttcttttcttttttcttttcttttcttatctttttcttagtactagtaagtcctgagaaccaaaagtttaagaattgctactctaagaaaaatgaattgaaaaaacaaagtagtggctcacgcctgtaatcccagcgctaaggaggcagcagcaagaggaataaatgatgtggtctcaaagacaccctgatctctttagcaagttccagggaagggacaagggacaggaggaggaggaagaaggaattggaattttaaattgttgaaattttacccagtgcccagtgtctctacacttgatatacaagcaatgtctttggattccaaagttattctagttagataccatatatactttctcagttttattctgtcagactttttcagtaagacatgtatttgtacaacacagctgtttttttatattactaaactactagaggtatttacttggaacgtacagattgggtctagaagccttttagaaatagaataaaaatttactaattgaccacctacttattttcttaattctttcctttttaagtggactcttggtggagtttctggattacaatactgaagagaatgtggtttatagtggatataaatgttgatgaaggcatttctattttaggcctacttacagggctggtaactagatactgaagagagtttctgatgtgcttttcttcatctgcaggatgatgtagctttgctaaggattcagaagctaagcagaaatgagcttaacatcctggtttttggtgagcagtggaggcactcgccacaggctgccacgagaaatgatttttgttggaagagatgactgtgagctcatgctgcaggtaatatgtcagccttctctatatgcaagcgctaagatcagctgggtgtcaagagctagctgccttcccctttacagagacacagtattcagtcagatatcagatacactttttaaaattcagacaagttttctggctcacctaactcttgcatctgtttaattaattttcacccttgtattatctacccttgtattatctgtaactaagttgtgttttacggattatagtttgaaaactgaaagcataaaatagagaaatgtgtatgcgtgcttgtatatgatgtacacatgtgtacatataggtatacttcctgtgtttataaaaaattcatttctaaatattctagttttagaattcacattttaagtgataataaatttggtcagatatccatcattttgtccctttttatcacgtaagtctttgggtttcttactcagtttgtctaacagtattcagtattaaaggaagaaatcttgggaggtaacactttcttaacaataagataggtaaaatagaaaataacttgttggatttctgtgtaacaattttacaatttttaaactatatagttgatgcagccaacaaaattaatttaaattcagaattaaaatatggatttgttgataagagtattttggaaatttagctatttttgtcttaaggaaatcaggccaaatttatgttgtttagatttaatctgcatttttgatctatccctgtatttatcagctgtcctattaatattgtatatataggtaaaaatctcttttgttactttagtattttcttgtggttgtgagcttaaattttttccttttagtcccgtagtgtggataagcagcatgcagtaatcaattatgaggcgtctatggatgaacatttggtgaaagatttaggcagccttaatggggtaagctaaccatgttgtttttattttgcttgaatacttgtttaatgttaataaagtcatattccttgtgtgtatagtccccttttctttagtttgtctttcccttttaaatacttaaaatgtgcatagtacattgaagtcatatgtagaagaagctaaggaataaatagaggaattaagaaaggcatttaatgatatggtatgtgatagatttcttttgggagatgagatggaagtttgagctcagtatgtgactgggttcatctgtggggagacagaaaaagtccctggtggtaagattgtgtaaaacatttttgggcacaagagacgttctcacttttagaaaataagaatggaaaggtagatttggtgctagatactagagaactagagaaaaacaaggatctaaacacttaacacacacaatgaacactaggatggcttttctttgtctttttagatatttttgtgtaattgtggtagattttttttatttctatatgaactttcacgtttttcagactatagtcacaggatatgagagaatattgatgtgttgaattatttcaacatcttaattttcttgtgactcttctaacaagcagatatattatctttgatactatatcctgttgaaatttaacaaactactgcattttgagtgttgtgaattgctgccatgaaaaatacactttaaacacacggaaatcgtattcataaatagaactttttcagtttataatttgcctactactaaaagacaaatcgattatttgaagttttttgggttaattattctgttgattctagtacatgtaattaagtttgcattgttcagatttgtactgaaatacctcacatgtggcatgagacagtatataacctgtcacctttctccttggcatatctccagaactatagtcttcctgctgttctactcttctccaggcaggagtccaattgggttagatttctttggcctatttgtctttccattctctttgccattctatatttttttaaagagtaaaactcaaattatacttcttaaagggatcaaaggaaaggtccttgcatttaggaacataaagtggttaatgttaacatgctgaaagaattaaaagtaaaaaaaaaaaaagacaaagtaggcaggattgctataaaggatatatgttaatagtgtggattcataactcctttggctaggttttttcattttctacacccaaaaacctgtgttttaatgtctttttttgtgcttgattatgaattactgggtgatttgtatgatttagctctcaattataatcacagtacacagagcttcgtacagttcatgaatccctcatatatatgtgtgtatgtgtatatgtgagtatgtaatagtaattatgtatgaatatatatgattgaatatatataattgaattaacttccaatccaaaagaccttgtagaataaaattttactatttttctatgtgtagaatgtagttcagaaagtttcatctcaaccacagttttgttattatatgtcttagtattctgtgggcccgttgaagtttctctgtgagaaccttgattatcttctgctctctttctttccattggcctgtgtgtcctaccacgactgtcatatcccagtcctatcttttgttactgtgctactatacagcagcctacgttctagcctaggccttttgattcccttttttcagactggagttcctgaggtcatgtgttcaatccccaacacacatgtagaaagtttagtataattacaaacatttgtaatctcagcaccggggagcagagacaggtaattcccagcatttgctgatcagcacacatagcctaccagcaagtcctgggtcctagtgaaacacacacacacacacacacacacacacacacacacacacacacacacacaaataaaacattaaaataaaatttaaaaatatataactatttaggttcatgttgggagatacttcatggtccttcttattaaatgtctaccagaataaaaacatcttgctttctttttgttctttttgttttttcttcttgttgattctggaaagaaaagtgagctagaattatcttcattccctgaagatacacagtgagataattttgtctatgctatgattatatcattgttataatctataatgctcattgtctattcattgtataattgagttgtatttatttcctgtttgcctccctttgattcaatggacatttaactaagtgtttttagctgtcctctttagtagcatttttaaaaaaggagaaaaggaaattaaaaaaaaaaaaacctacaaagaaagcatgtcaagctttgcactaagaaactgaaggaagacagaatgacttatgtcttttgcctcctcattcctctgtctgggcttcactatcatagccattagcaaccactgaatacttgagacatgactagtctaaaattccaaaaacttacacatatatgtgaaataccttactaattttgcttcaactagtatgttttaaatacactagattacatttaaaatgcattatcaaaactatttcttgttacaaacctacaagaaaatacagccaggcagtggtggtgaatgactttaattccagcactccagaggcagagacaggaggatgtttgtgggttccaggccagcatgatttacaaagctacacacacaaaccctgtctcaaaaaatcaaaaaccaaaaaacaaacgaagaaaacacaacaagtagtgtatactatttgattgggaaattgtggcgtatttctcttagatagtgtctaggtaattctgcagtttgttttgttattggtaatttttagcattgttagaaataattgaaaataaagcagaatttcaacatataggaaaaatccatttactaagatactgcaatgtatcatagattcatagaaagatccacggattcttggggcatttgtaaagcaaccacaagatggctcagcagttaaagatgcttgcagctaagcctgatgaactgagtttaattcctgaaacccacacggtagaaagagaactaattccagcaaaatttcctgaccttcacatgcacagtactgtacacatgtgtacacacacacaatcaattaataaatgtaataaatttttaagtggaatgattctgagaatgaagcgataaagtattaatctttacaaataaaattcctaaaaatcctgaagctgtttagaattaatcatttttattctgtataggtttccagcagattaagaacttttctgacttcatctttagaaaacttccaagtgtcaaaattcactgtgttttatgttaccagtaatattgacaaaggttaaaagtatgagataattatgctggaggctgcttggcacatgttaggatgcatttcatcataagaacttttgaatagtaattggttgatgaatttgactgaaatgtgagaattaatactttatatgcaatataacctttttctttcttccttgtagacttttgtgaatgatgtaaggataccagagcagacttacatcactttgaaacttgaagataagctgagatttggatatgatatccttatataattttttgcatttattaagtgaatttaaaaaatatgtgctatgctacaagtaacatcttgtgatatcagaattcacagtactacaagtttgtgcttattaggtgttttctgcttgttttcggttactggttcctaggaatgatcctgggaagcttggtaaggctcagctgtttctcatctctctttttgtgtgtgctgctgtgcgtatagtttgggtgttaaaagagtggaattgggaggaagacagtgaaagtcttaagtactgtctacctaggttcttgccaagtgaaatatgaggtcccaagtcagtctcttaggaggatataaaacattaacctgccttcccttctatgctatcctgctgttttaatttaaactttaacatcgactgctttctggcaccaactttaattgactagcatgttgtcatttagtgtgtatttgaatttgtgtttaaaaatcagaggctaataattggacgggtatgatattactgtagtgtaaagaatagtacaaaggaacctagtaaaatgaagtaatataactaagcaataatagcatttctatttgcatttagttaaaataaaaatatttctcatgatgaaaatttcttgaggtttatttagtttttaaacatttaccaaaactcaaataataatttgaaaacttaaacattaacaacctcatagacttagatcactttatcagagaaattatagtctcagaaaactgtagttgatacgcaaatgtactgacacaaataacaaaagatagaatttttaaagtttaaaatttaaagctagattacaaatataacatttatatttaaaaaaactgaaaaaaatgaatacttatttgttatatattctaaatctttccaaaaatatgtttggtgaggcttatgatgtagctcagcagttgaagttacttcctgccaagactggcaacctgagcttaatccgcatgacccacacggtggaaggagagaagactcctgaaatatattgtgtgacctctatgtatgtgtcttggtgcacatacatgcatacatacaccaattaaaaatgtaaatgttttaaattacataaaataataaaaattactttcaaccagcttcagttttatcaaaacttttaggtatatttatatgcaagtatctcctttaattaatttactattagttgtcttaaaaaagggaaaatgctaagaaattcagattttaataaaatttgtaaagttacttttgagcactaatttcagaagaaactatagcaaatgcagtatagtatgcttctaatcctcacttctcaggaggctggaccaggaagatgacttcagcatagtgagagcactcacaagaggaggaggagacataagaaatagcctatgcctttgcagattgctaactattttccccctaatatgtaactcataatacatctaaaaatggctagggcttttaattttttgtccttagggacttcctcagaatcatacagtcagtattgagctaacactgttacttaaatgtcccgatgaagttcatttagtttcattgttttcatttagcattttatactgattataattccaagaattttacataaagcactggttctcaacatgtgggttgtgacccctttgagaattgcatatcaaatattctaaatataagttatttatattacaattcataaaagtagggaaattacggttatgtagtagcaagaaaaataattttatcattgggtcatcacaacttgaggaactgtattaaagggggtcacatcattaggaagattgagaaccactaatataaatgaacataggtctgttaaattggcagaaattttattccacgggacagaattttttaaatcattgcatgtgataactatgtttgtttctgtattagctatagtagactggggaaattgtcatgctttattcacatataaaatcaatagccaatgtatacagactgtgccctagagtgggaagctctgattaacaacatgtcaccttattagatcaacaacattaacatggcttaagatttaaactagagaacattatgtatataccatcagcctgctttctaactagagacatgtttttgaaaagcatgaactcattgaaatattccagtttccaaaatgaccataaactcaaaacaacaatcgataaacctcagaagcttgtgatcattccgatgaccacaaatctggcaggtaaggaagccaaataaattaattcatttcatatttgttagatgcttcctattatgcaggtgtagtttttgttggtctgggtatctactaaattattttttaaacaatattattttagtctttgaaggtgtcctgcaatttattatgaaaatactcactttccctcccccaattccttccgtaaccaccctctgctcccttcccacctaacttttgagtttagttttttcaggctcttccccacctcagtttgtgtggcctagctaactagccttgggaatggacctgacctggactgtagataactgaccaggaattggttgcatcattaaagaaaactgacactagcccagtgattggtctcaaactcacagtccttttgcttcagctccctgcatgccaaggtcataggcatatgccaccatatctggttgtagttttcttttttcgtcttttttcttattgctatgcaaaatcctgggtttcaaatacagtttgcttttgttgcctctttacagtcttacattcccagtgacttctttcctgctttcttatcttaaatgttttattatcatcctcttcagtaccactttcctacactctttccactttgattatatacccttatcacatacacatacatacatacaaacatacatacacacatatgcacattaagatccaaagtccacatataaaatagaaaatgtgggatttatctttctgaattttaattagcttgcttaattacatattcatccactccatgcatattataatttccttttgctttatagctgagtagaattccgtcatgtatatgtagtacctcttcatcaaacattgaactgttgactgtcatctgagctggctccctttccttactattgtgaataaagtgtaacgagtacagatgttcaagcgcctctttgttgggatgtggagtactttgggtatatgcccaggtatggaagatagctgggacatatattaactgtctctggtttttgatacgctttggtacagatgcctataattttatatcaatttacactcccatcatcaatgaataaatgtttctgttacatgtatatttttatgtatatcagcaaatatgtatgtgacaaaaggaaaattttaatatttcagagctttaggaagctactttattgacaagaaagctccagacagaattaagtagattatttggggatgggaggttctgttcactaaattacttattgagtaagaacaaagattaacgaaatgaattgcgtattctccaaggttgtttacagctctaagaaattctgttaataagtttactgctcccattacatttggacctctctgtctctgtctctgtctctgtgtctctgtctctctttcgctcacatcacagtgattacagttttctactcctgaagtgattgataaatgctttgagttagtaaaggaggatagaatttagcacatggttataaaatgtctttcactgcaaggttgataatggtaggaaacaggacctctagtgaattgatctttagtaagaggccttgttgttttggcataataatgaaagccttcattatatctggcacttgttctcatgtgtatagaatcattgttttataatataatatgaccttattgcagtccatggtgggaaggggtggtatggttgccatataaacccttattatagcattcattttctttgtacttacaaagtgaacctcattattatcaaagttgataaaaatctgataatcagttccttcaggatttgcttttggtattaactcatgagacatttttacacctttatgactaggaatctataatttggtcctgtcatattgttgtttgtgaaaataaaaatatttgtgctctaattatttgaaggctagtattgcctgagattataaatacttattagattttttaagttgttaatatttttaagtggcaaattacatattttaaatattttttaatattaaagggagtattatagacgcatgctgcattccaggtactcagtgagctgccagaagaatctcagatttaaaaaaaaaatctcagatttgaggatagcctagagatcttgtctgtaagaaaaatttcttttaaatcttaggatgtggttcagcggtagaaaacttgtctagcatatgcaaagtcctggatttaatccccagtacctgtagaaatcgatgataaataaacataataatcctatatttactcttgaaatagaacaatctccaaattatatttgatgaccatattcaagcacagtaaccaaaattttggagttatattcttccttagctctgtttacatacaaatctcttcactgtagttcgaggagaaatgagggtccctgaagaggctcttaaggtaagagtttacccttgtggttgactattactcactacagttgactcctttatcgaagcttccctttgattttaaatgttttatagcatgagaagtttaccattcagcttcagttgtctcagaagtcttcagaatcagaattaccaaaatcagcaagtgctaaaggcacagactcaaaagtggatgctactacagaagtgccacacagagccacagaagcactgaaatctgaggagaaatccatgggtaagtgctttgtatgctatggagaatgacctacaatagctatatctatctttgtattcagagggaggggaggaagagaggaagcacaaaaggaaaatatcaagttgggtactcacagttggttaactgtggaagcacctttaaagcagttggagttcccagtacaaagtcccaggcagaatagactgtcacttgatgtgaggcttccaagtaaccacagcaactaacctacagaaaggtagtatcatctaataggttgctcacaacatccagtagtaactaactgaggaaactgaggcagttagctgcagttctcaaatgtagcttcccagagctatgtttccagctcctctcttcctctgtagacactttcatattataggataaacaacaataacctctgatggaaatagtttacattttagctgttttcaaggacaccatgttttactttggggctcttttgtttttgtctccctccctgtcagagttaggtggactagctcatccccagaccttggaggacactttgagacaaactgcttgggatctaaagtgggggatgtgtctacctcacttccagaactagcttctcaatgacctcaaacagcacctgatagtttgtcaataattatatacattacaataacaacacgattgttgtcactatgatatacattacaataagctaattcctttggaaattctgaatttatgtttggggttgaagaaattgcattctttgttctcaaacatgtgtctatacctgcataaaaataattatactagtgatccatcccagagcacatttcaatatagcctgtttttcctagaaaacattgacagaactatatgtatgtgcaaccaatatcttaattattaaggaaagtgatttcaatatttgaaggatatttaatagtttagcatttcatattatctatgtttctctgaattacaattgaaataaaatggaaaaatttaattaccaccctcatatcatataatgcttacagttttaataactacaaagatgttttatatagataatcccttcatgtaacaaatgtattaaattgataaacagtatcacagctactagaactgaagatctgttagcactgagtacaaatatagttactgttcaatactcttatgttgttgtacatgccagtatttgctttagttttatcttttatgtatttagatttagtgacatttctggtcagactggtttcattattcttttggtaattctaacaaaattcttccacctaagatacttctgtctaagtactcaaagatcatttgttcccggggctcaggtatatatcagaagtccctaacatgtaataaaaagctgttgattatagcatgttgcattactcaatcattgctgatcttaattcacttaatggtgtctagagctgcgtaaggtcatgctcaaatgttacgttactaaaagtaaagtacttttaatcaactaagtaaatctagcactatgcaaaatatgttttcttgcttcatctgctttagagagattttcctcccttctcttttagatgtttctgctatgccccgtggtactccattatatgggcagccatcatggtggggagatgatgaggtagatgaacaaagagctttcaaatctaatggcaagcctgaagaaaaaaatcatgaaactgggacttcaggtaaaaatacttcaatagctatgatatcaaattcatactgggcaagtatttatattccaaacaaaagtcagtctactctgaaaaatgatctataacataacttgatttttttaaaggtgattgtggctttgctcttgtaatatattatgagtttaacataaaatactaaatatggtatccttataaaaatctcatcatatttttccagcttatgaaattgttaaacagattaatgccacacactggacatttaagcattttaaaatatgcaaatgaattgataaagtagtagggacatgtgagttacatgtctttacttgattcataatcatatactacaaaataaaaaatctgttgtattaaaaaatacaatatgaaattataagttctttaaagccccagcatgcttactttattaagatagcaatatgatgcagagttcggcagccaaagtgtagaaatagattcttatattattaactaaggaacttgggtggttaagtggtgaccagtgtccagaaaagtcaagatttccaagataaatggagataccaattgtcgcataaagttgttgaaaagacatcagaactgaaggatggaacaaccaatttctttgttaacagcagataaggatccaaaactggaggaataaagtacagacaccaaagatcagttttgaagacatagtgtgccactgaggcaaggacaaaccccattagaactctttcaaggtgtttttgacttcatttatacaaagtaagcaggacagttttcttagctggagagttatgaacattgtgtcttttgacacagtctaattacaccagagtacaagtctttaaaaagctgtcatgatcaagtagtacttaggatgccaaatttgaaaatagctttccatcacaaatttgtttcttcaccagtgctgttctttatatcatttaatattatttaacatgccttctgttgtaaatgaaagaattgctgtctgatactgagtaggaaaggaatgtcttggctcccatacctgatttctctcagggttgttcagtgcaatagatagcattgttatctagtttcaccatctctgatttggtatccacagtacatacatactgatagagttacccctcacattcaaagctgctgccatcagtattcaaagttatacagttttgatcacacccagaagtaaagaacaaaagttgtataagaagacctcccagtatttggaagaagacctctcccaaaatcttcagcagatctctcattagcttctcacagattaaagaaggtcacctgctattctaaccagtctctggcaaacaatgtgagactatcattatcttgctcatcttgaagcatgatatggagttatttgtccctaaggcatataagcagtgtcatagaagagtggtaccagaaagtattgaagttcttttaggaaaaagttctttaggaaggaaactggacgtcaatcaagaatgtctactttttatggtcttcattttatctaatataaaacctattttgttgtctttgttttcactgatgaatcataattcaacttattgctgtaaactttccatagcaaatgtgaactgatctttattttagttccacaacaactagagtgattttgtcttgcttgacaaaattttgaactttttgttccctagtgcacctgatatctgttactgttttagtgttctctcccaatgtacccccacataaattgtgctaattcctgcctcctcttctcccacagtatgtgcattgtaaattactaaatgatactatactgctagtgaacaatactgctttggttaattgtctttgtctaaaacttcatcactgaactctaaattccttacttcaagtaccatatattctaacctcattttgcactagagagaactatctggttagggggagtataaccaattagatgcattaaagaacacagattaatttaattgttgcaaaattcagaaaataattgcatgatagtggaaattaaggagccataaaaatgtagcatttgttccctcacacagttttgaaattctgacatacataacttgtaaaataaaatgacacatacatatgactatgataaagagtagaaccatgacaaataatggcaagcattcagttgcacttagtttgtctgcttcttccaaatgatttatatacatttcatcatgacaatgtctaaaggtagtagttacctttgttatttttgcccattttatagataaaagaattgagacacagagtgatactaacttacttactgaagagagcactattcatgagattccaaaaatagacacatcaaattcccatacagcaggtgtagtacatgcttcatttaccattgaatttgataacagtacaccactgaaagtaactctttgacagaattcacttctgaccatcgccacaagccaatgaaggcttctacagattaagaccctgtctcacatataaataaacaaagccaaactgggctactaaagacctatctcaaaataaataaacaaatatatcagatacatgtatgtgtatacacacacacacacacacacacacacacacacacacatatatatatatatatatatatgtatctgttaatattgtccagtttaggcatacaaattcagttctagcttagttactaaattgctctttaaattaattataaaatattagtataaacaatactatcccatgtagtttaatttggtttaaataaaaatggctgtgaatagaaatagaaaattcataaacttcagactatgttctttcaatgttgtaagagaagaaacctgttcaatttttttagcatgatcttaaaactccttagcaatttttctaatatgtatttctagtcagactacagttctgacaggctcacacctttcatgactttgtctacagagaaattaatctctgttcacatactacattttctagatgaggaaactttaattttacaactgagttactgaaaagtgaaaccatttgtcaaaagtcattatgaaatgtagttatctacagcaccgctttcttaggcagagaaagctaagaataatttaagtttttccttcattactgagaatcaccaagtgtaagttattgaacaatgaaatctgacagtgatgtcctgcagagcctgagcctctcaggcccttgatactgagtagcactgggagactgttttcaaggctatttatctgctctggattttcatcttaacctctattatttgctataataattcctgtgaaatactttcacctttctttggcaaaccaaatggagtaaattttgaaaagaataatttttactttgaaaatttctatttgcaaatgttccctgccttttgtgtacattttttgacaatatgaccatggctattgtgatcattattattttagtagtgtagcctgatatcttctatatcatatcccacatatttgataacaagaatattactctgtaacaaaagaagatagttttgttataatttcatactcaatgtactaataaagaagacaattatagcacctaatgaattgtacaaagatgtaatgtttgaaaaagtatttcagaagactacatacttcttgtaattaaaaaaaagattggaaacagcctagtatgcctgtattgccttttctttctagtaaattgtaattgatttactatgaaatctgtttaaaataaggttgatatttgagccttagggaaatttatttcatattaattcttttatgatagtaggctgtcttggtaataggtactgcattttattttctcaaccaacaggcagtttaatcttcgccttttttcttttacattgtgttaccaaacacctgtttttgcatctttatgcagtcagtgatttaagcagtcactggaggaattgtcagtgttctgtttttgcctgctctccttgccacttactgcttgtaattgaactttcacccttgacctttaggaagttgtgcacaatttgatatacagaggtgtagactaagtttctcccagacttactggctgactaaagaattttctgtttctgcattatttctttcatactactgcttgaattgccatgcttcaagcaagcaagccacatgctgtatcgctaaccactcttaccttataacatgtgtgtcatctcccaagatattatcaattttgtcctaaagtagggggtctctgaatatgatagagactggtaaatggaattatgacttcctaagcatcgcttatataattacttcctgtctccatcctcacttgactgcctcttcaccgtcagagccctacgtttgttctcaagggtttcaaatagctcattctggtaactcaattaggtaatggatgctttttctatcacactatgtatgtgtttatttatacacacatgtatgtatagaacatctccatctatactttctttctcagcttgatgatttctagactttctagttgaaaaatgtatggagctgtcagtgcagagtccatcttttcctgctttgcttccccccccccctttttttttttttttttgctgctgctgtttatcttgcatctcctatttgtaattggatcatagtcaagatcctttgatctctgtgacatctctttgacttttttctgtcatataagtgccattgtttttcatccggattatcatctgccttctgattctcagaataatgcaaatggtcattaccaatgaccttcatgctacaggcttccaaatattttgaattctctctcatttttctcattagggtgcagcatagatgccaagcaagcggaggaacagtctgcagctgcaaatgaagaagcactttttcctttctgtagggaaccaagttattttgaaattcctacaaaagaattccagcagccatcacagatagcagagagcactattcatgagattccaacaaaagacacgccaagttcccatatagcaggtgcagggcatgcttcatttaccattgaatttgatgacagtatgccaggaaaagtaactattagagatcatgtgacaaaattcacttctgaccatcgtcacaagtcaaagaaggccactcctggaactcaagacttgccgggaattcagacaggaatgatggcgccagaaaacaaagtagctgactggctagcacaaaacaaccctcctcaaatggtgtgggagagaacagaagaggattccaagagcattaaaagtgatgttcccgtgtacttgaaaaggttgaaaggtaaagtgactttcagagattcctattgtgtcataatgaaaagttggtcatcaaacttagcagactgctattaattatacaatggaaaatatctgcgtttcaaatttacacttaattttaaagctcaaaagcaaagagcaccgttcatgtccaaattactcattcaaaattttcttcattttcttcccaatgtggttacattggtttgtggaggaggatatttatgtcattaattatctttattttttcctacagaaaagcaaaatctattcattatgcaaaatagaatttcctagaagataatccctattgttttcttgatttaaagaaaggatatgttcagttgttttatctgtatcatgctttcagtgaagtatcatagctaggttttgaaaacaaaattaagctacttggtatggactgaaagttctgtttagctcagtcacactattgatggggtgcttcaaatgtaagctgtttgcagaggctgctcacaaaacacattttcagcttagatgaatttgctaggtgtctattctaacgtaaattttatgctatcaggaattataatttagatgttcatttgtggataataattgcatattattatatagtaacattagctattgtatatactatattcaacacttgatcacaatcattagaaacttcgtacatggatattggttgtaacaaataatcagctttattcccactggttttgtgaattgaatttattttggaatttgtgttattctattttatgttttaatatgctgtcaatacaggaatgattttgaacaaagtataattgtatgtgaatctaaccattctgtggcttttattaggagttgcttaattttattttttaaaaatgctttttgaggtggggatcacatgtgtcttactctgtttcttaacatttcatctggacttgagcatacattgttatctagtgacttcattgttaatgacggaattgagtgacttaatccgtaccttacaacctggaattctggtcaagtaatgaagaaatagtaatttatacttagtaccaatatgtttctaagacatttcaggatattgagagcatatgattacctaattctttgttgtcacttattaaaatatttagtgatagtcatcaatagtcacctggaataaagggttttgagttctggtgcaacatatttattcctactagatgatatttatatataattgaaaagtatacatatgcataggttaaaggtaacatttgtaaactgaccaataatataaatttgatgaaaatattaataagctagtataatattaaaggtagtatatatattggaaatgagtcgtcctaaagtttatactctcactaaatatatgaaggttgagttgaaaagatcctttaggaaggtagcatttaaaaatctttgttaaggggctggaaaggtagctcagcagttaggaaccaggtttagtttccaacacccggatggtggctccacatcatccataaagaggggtccagggcccttttctgacttcttcaggcatcagacactcacaggttgaacatagatacatgcaggcaaaacactcatagacattaaataaaataaatacttggaaaaatcttttaaaatcctttcataacagtgccattgttattgtttcctgtattaacaattattttaaaccatcattttagtatattctctgctcttcaccaagacgtgtttgagcttaattaaaagtagaatcattagtatccatatgaacactttctctacactgatcagtatatgttttaaatttttgagaaagattaatctatcagttttgaatttgatttccaggtaggcatctctcagtgtggtaccattgctgggaactctcaaatttaacattattctgtttttaaagcctttcaagaaaatcctttcacagcaataactcactttgtatctcaaatagaccgatgttatttcttcatacttattcacaaatgatatttgacttgcttcagaaatcagagctgctatcagttgataacagtttcctactatttaggttatgaaagggatacattcagattgtaggaagattgtaacaatttcttaaaacttgagctttttagtaactaaaaaacaactgataccagatagattagataagatggatggatagatagatagatagatagatagatagatagatagatagatagatagatagagatgccttgctcctacaagagtaaagtgcatgcgctttgggacagtgaggaaaatagtgttcacaaagcccatacactttcaccctttaggagagttgcagcttcttttagccacagctttttatgaagtacagcgaaactaacctgagagagtaaatgaacttccagatttaggcatcattagtgatgggcagatgagctaagcatgttgagcatttcctggtggtctttttgctgagtagaatcagaagattgcagctctgacctgatcctcacctttcatcttgtgtaatacactgaagcactagaaggaatagtaattttacaagaaagaaaatgactaatctccaacaaattaatatagcaggaaagatatgcaaatgttattttcattaaaaattttgattgtaagtttatttggtcttcctgtataagaaatattatagttcattcttttggatcttagcaaactgaattcctattcagcttatccaacccaatatgtttttaacagtgctatagtaaaaattgtatttaaaatagaggttatatttgtatttgctttccatatactacctgtgtttcctaaattatcagtggcagagattccacgtattaaattctttttcttttcaattatgttttgggtattaaataatttgatgagttttacatttgtcccatttgttttttagattaatatatctcttgcccagccccattatttttaccttattatctccctgtttctctttttcaagatggcattcagttctaccactcccttgtctatcctctttccttttttgtgctacattttgcaggtaactgttttgtattaaattatcaccattgttggtagcttccagatttactaggagcaaactttataattccttcccctagacatacaactcatattctttcatacacatcaagtctttactcgctgattggttgtcttgtaggctaacacattattttcaggtgattgcattagagtagacagcctgggaatgttcaggaatgttcctaatcagattacttctacacaactggaatctgccgatgtatattccaatgcgctagatcatttataactttaaaaggattttagttaacctttaattggtgattccatctgaatcatgcctagagtagctcttgctctgatccagtaaaacttttgttaggagataggtgtttcaaaattcacatatgttttaatgtgactgtacttctttgacatgacattcgcctatatttatttgtatcatgtggtttagtagacggaagggtgtcatatgtctttggtagggttctaagcatttttgaactcttttaaaccagtatagtttagaaatctctgctaacaaaacatttgtaaaattatgtcataaatagaaactaaaaatttcaatcttttattaaaaggtatgctgaacttttaaaagtatcgaatgtcacaatttagatatattccatttttatgacatttatgttctgtttaataatatgcggttgcagttacaccagtcttttaaaaaattactccttttattttttgagattatgacgacttcatttccccatttcctttcctccctccagacccttccaaatgcctcttcttagttcagtctctttcaaattattaccttctttttcatgaattcctgttacaaacataattctaaatacatgaacataacctgctcagtctgtataatcttgcttgtgtgtgttttcaggcagagctaaccatctggtattggataaccagttggtgtgctcttccttaggaaagactatttctcccactcccaacactcattagttgcctgcagttctttgtgtagggttgaagccttgcttactcttaatgttaagagtcagttttttgtgggttttcttgttttgttaataaaggtttacgattcagaggcagaactaatgtgtattgctattataagtataaactatgacagatgatagtgcattgctcttaagtcattgatgaatcttttataaagttagaatctagagaaagaaaagtaatttatccagttgtttatgaagggcctccttgttggttgattaaatgtaattgtaatcattgtgtttgaggacagtatgcagagcctgttacggaaaacagcatacaactttggattaggagggggaagggtgtcaaaacaaatagcacttttgtatgtgcttctgattttctccgtggaagttttttcttttctactatatcattcctctcttatgtccaggaaacaaacacgacgatggcacacagagtgattcagaaaatgctggggcacacaggcgctgtagcaagcgtgcaactcttgaggaacatttacgacgccatcactcagaacagaaaaagaagacccagtctactgaaaagcatcaagaccaggccgttgtaagtcaaactgcttttatgattgcattctttgatgaagatcattccagaaagaggaggtcatattcttttacgcaaagttcaggaatctcatgtcaggaaactactttctcaacaccacatacaaaacttgaaaaaacaaaatctccaccagcagatgccaaagtggtttctttgtctttacagactagctctacgcatcacagaggggggcatggtgttccacatgggaaattgttaaaacagaaatcagaggagccatcggtgtcaatacccttcctacaaactgcattgttaagaagttcagggagtcttgggcacagaccaagccaggagatggataaaatgttaaaaaatcaagctacttctgctacttcagaaaaggataatgatgatgaccaaagtgacaagggtacttataccattgagttagagaaccccaacagtgaggaggtggaagcaagaaaaatgattgacaaggtaaataattgaaatttgagtatgatgttagctttgtggggcttttgactattggaccttattggagagttggtgtggcatgttctcatgtaggtggtggtattggaaccttagggttttgttagggacctagaagactagcagcaagaacaaaatattttctgctttcattttgtttatattctgaatttttctgaattttatatgtaaggtcctctacatttaaactacctgggccttcttaaggtatattagtttgattggctttaaaagtaatgccattttgcatttatttatacaaaactgaacaaagaagtacattgctataattattaaatgaatataaatatgaacaggttttctacctactaatttcattttagaagcagataaaaagcatatgttgtgattatctttgatcctctttgtttctctttactgccatctttgatgaaatcagaacaaaatcagtttttatatattttgttcattttagtcaggcttaaacccagtcctaatgattgtctatatttcaggtacttttttgatgttattggtttagttatatgatgattgttgtatgatttgaaaagtacttcccagttttgatgtgactgtgaatagttaaccttagaataagttatttattttacctctttgacaatagcaacctaagtttggctaaatattaatccctcgtttaaattcttgttacccaaaatgtgctcatgagtgtacagcgttgatatcacttaggaggcacatacagatacattgaatcagaatctgtaattaaaatttagatgaccatgtggttcatatgcacattaacatttgcaatatgccagtttaggtgatgagttttcagaatggcttgtcagaatgggcaagatctaaccctctgggaagcaggaaaaaatagtaggattatgttcacttttaattctcagtgtgttacttctattttagtctgtgttctgtagtatttgtgatgcattcactgcatacatgtataatttgtagatataaatttattgaggagtctagttatcctactgttggagtgacataatgccaaattttgagacccgttagtcttggaaataaacatttatataagtagtactttactgtttaaaaaaagggggggtatgggttttcaaaagccatagatattttacttgatggtgattaatattttttccattaaaatattattttatgtttgtatatattacaggggttaagaaaatggctatctgtaggcatctggaattaagtgtgtaaactctacatgtactatactcttggtataaataaacctctgtaagcttaaatgtcattcatttctgaagtgaagaaattttttaagtttagcagaaattcaaaaacatagtatgtttatcataatgtctgtcaaagatgtatgaaaatgatctctaaatattactttttaatattatttccacatatgactatttactcaaagtactagaaagttctttttaacactaaaaggattacaggtgaagacaaagtggaagttacagtgcaggggaccaacctggcctggatcagccaacgagaaagaaggcattgccacaaatgtgcctcagaggacagacaagttggggggattcagttctaaccttttaattttatgggattgaactcaggttgactttacctgcttagccctctccagtccctccataactcatttttgtattactaaaactagaactccattcttataattcactgttaaaaggctttctctggctcccctatagcaaccactagcaccctagctttctgcctattagggtgtctgtcatgtgttttttctctatacaagtaacctctgtctgatttaattctgacaagaatgatctttcttttttgtagtagactataactgtcttttgaaagcatgaatgtgaaagtttgatgtgtatttgaatgtatttagatgatctttgctatattagctcatgtaatccagtgaatttatagattggttaaacccaacatgatacccccccattgtttcttttggtgttttgagacagggtttctctgtataactactctagctatcctagaacttgctctgtagaacaggctggcctcaaactcacggagatatgcctttctctacctcctgagtattggtattaaaaggcatgtgccactatcgcccagcaatttttctctagtttttatgtcttgatctcaaaataactttctctgtgttacaagcttagctttgttaatagtattgaaagtgcaaatgaatagagattgggtaagaagaaaagaaaatatattaatttcagtaaaagagcctgtgtaatggaagactagagggcctgctgagatctaccaaagctaatgcccccagcttaaaatcagtttggcacaaagataagagaatatggtcattgataagcagccagattttatgacgtggtacatgaaaaagtagagaaattagaaattttaacaagaaatatttcaataattttaatttatccaataagctaatagagtatttgagaagctacagagtcaatagagaaaggtgcaggaaatgatgaaagacaggggattgaaggaaaactaaggcaataactcaagaaaattaaaaaagaagttaaactttttattcataaagaagcaccaaggaaaagataagagttatgtagtaccttattttaaaaattgaagtaaatttcacataacataaaattgggtattttagtcattgagaatgtacagttcagttaggtgttacaatctgtacccgtaattccaggacttggtaaactgaggcagaatgatgattagttaaaagtaagatttcggaagcaaaacatcactgtacagtctggaagctgtggtaattcatactgttgtgttgattgtattttctaactccagaatgtattcatcactcttaagagaaatcacacttaaatggtcttttcccattgtttggaccccttggaactacttatctgctttctgtctttgtacatttactttgtctggatatttcatataaacaatcattctatttgtggcctttaatgactagctacttttactttgaatattgtcttcaaagttcatctatgttgttacatgcataactactcattcttttttatgataaatcataaataattctatgatagatccttttatctattcatctattgacaaatgttgaatttgagttcatctttgactgtaaataatgatgccatgaacaagaatgtatgtatagactacaataaatggtaaatagtctctcctatcccattctgaacttttgtaacaattttgtctaagttttacatttgaagagttagttacaaataccagaatcatagttttaaataatcacaatatatttgttccattgaattttaagatatttttctttttaaaaactaagctatattttcctgggaaaatgctataaatttaaaaagaaaacttccttaaataatcttgtttctttgacactatttgcttggagttcagcatagttctttatgggttgtttcctgaatgttttttggtaaggtgtaggaccttgtactagtgatttaacttacagagagaggcccccacttgtcttacccagaaggaccttgttcctgggggatgtaagcctacaaaagtaaggtgtttactattagctttctcatttctatgagaagatggattctaaattttaattgattaggagttttttagtgctgggtctcattcatgttagatttgcacattccttttttaaatttaatacattcagtattatgcaatgaaattctcatttggtctacatttgtgttataattatgatatagtttcccactgccccttctttcacactgtttcctgttacaatgagcaggtctcctatatctgatattacaatgtgtaattttgacctatgtggctgtttaataggtagaatataaatatccataaaatagcaaaaataaatctgaactaataaaaaataatctcttgggaaaaaatgaaataaaaccaacattttctttttaaaaaaaatagccaaaaatatcatctctttaagtggagcactggtaggccccagccccactcttaccattttgaattgaaagccatgaaactttgggctctgtagttttagacttttaaataatgacagtataacctggtaatagaaaaaccaaaatcaagggctctgcttgtgttatatataacataatctgttattatctggagggttctttctttttaatgttaatctaaagttgaaacagaaatgtaaaagttttacagaactttagtttaataatagagtgcctctgtatggttcttttagattcgtgtgtgtgtgtgtgtgtgtgtgtgtgtgtgtgtgtgtgtgtgtgtgtgtgtgtgtgtgtgtgtgttagaccttggtttttaaatttcctgtagtgcctacatttagtaccatgcctcagtagccagttgttttagtagccactgtactctaggtgggaacttctataataaatatgatatgtctgtattctgagctaaagattgagaatgtgtttattgaaacatgtaatagtgtggagcaaaaggttctattctctttgcccaacactggaatatgttgaagggatcaattacagatgtcccaggtggaataccagcctggatcacggagacagtagtaggtagcatgtgaatgtcatttttctctaagataacatgagtcattttagtaatgtcagaccccaaagagctccttttgcacctgccctgggtgattctgtgaaaattccagtaaagaaagatacagattagacaggtatttgtctttctcccctgtgggtgtccaatataaagaactcctggctaaaggagagagccagattttgttatgaacaagattgaatttgtgattggcaccaagtcagagtagggcagggagaaaataacgagcttgtggctaacaaactgcatttgaagtgtcttgagctgtccatgatgacaggtaagctgctttgtacacaggtggcagatcaaataaagatacgtatactggatgaaatctcctagtgacggactctagaatgaaaagtggaaaatcttgtaaatttggacttggtgaggcactctcaagttctagaccattattagatcatatgtcagtatgtgtgtattttagaaatgcagaaacatgcatgtcttggagcatatagatagtgtaactaactgtgcactgtgtttccacatgcaagatgtcacaagtggatgtctgtgtgcctacacacagaaatgaatgtattgtttgagctggactagctgttgctaccttattcatgtttttcaatgtgttttaaaagccggcatgctggcttattcatgcctgtaatttacaacacttgagaagctcagacaagaggaatgtggtgagatttaggtcagtctggattacactatgagactacctcagtaattaacaaaataattaaactaaatcatagctgtgaaatctcaaagcttttttttttttttgccgaactggaatttttttcctgccctgccacctgtatggaaagaaattggccattctctaacagatatatgagtaggtgtatctctgatactttaaagggaatgtgtagaaaatcgctggggtgctgtctattgccttcagctcccgttagagcacaattctagatataaccttttcaaaatactagtctattaacaatgcaatatccaagtcatttttattattaaaagtattttgaagaggtttaccatatttttaaattggaaaccactggtgattgtattttaagaagtcaaatttatgtctgatacaattaattattaccaaatcagaaataataaattgacatgcaacaatgatgcaaaatgtagggaatcatatatggttatttttctactcccacacttgaggttttttttttttcctggtaatgcaaaaataaaacaaaccagtaaattttcagtgcaactattttgtaaaagacccacaagccacttccgctctaatgttgctttccttacaaatgaaggtaaagtcacaagacacaggcacaccctctttgcttcactgttttagttgcttaattcactctgtctagcaggataaagcaaggaaactatttattcccataacctggtttccatatactaactgtctcatttaatttaaagtaataatgtgtaacttgttcttaaagcaatgatatttctaaccaaattcttgggaaactgtatttaaattaaattaagcaataaagctgtttagtggtaaaatttccatatttcactggatttaaagatgtagtctctgctttgctaaatgcacatttcataatctatcagattattatatgaccatcagtttccttttctgtatgttgctatagcaagcatttccagcctaccacctatgggctacatatatcccagtgtagctatgaatactacccaacacatttgtagatgagaaggtcattgcatcagcatgagaagagatggtaccactgcaagtggtttcccttgtaggaagcaaaggttctaaaggtcatctctacacattgtctgtttgaggacatgtttttctgattgtaatgatcagtgccccatacagagcaagtctgggggacattcatccattcagttgaaccaagttcaaactgaatagtaaaataagattttaaatgtattcactataggttttttgcagtttgtttgcaaggtgttagatccaggtccctttgtgtaccagaaaatgactaacactggagtcttgcctgttgggaaaatataatcacatgactattggtctgtgttgagagcttttcaaagtgttgaccattgaccgtcatttacttattgataaagttaatctatgtgaatagaccaagaacctgcatttcagaaaaattgctatactttgtgaaaatcattcaataaaatcttgtttaaaggtaccttaggaaattatatgtaaaaatataagatatatgcaaatgaaaccttttttagtaaaaaagcaaataaagaggcatgtgtttttttaacatgcttttctgaaatagaaacaagaagcaagctgaaaatacgctgaagtgttttcttgactcttctcatgattataatgtttagctttaagtcattcaacaaatctaatgtagtattctgaatatttcattttatcaactagaataatttgttaattattaaaagggatagccacatctgcagctgtaggcttcctgtccagtccagctggggggtcaccctgtcattaaatatggtttcctgtttctgaaattgctaggtgaggttaacttgggatatcttttatttacttctgatgttgttgatgatagtcacttactaatcaggtgcccacactttaattttcattatgaaacaaatttttcctcctaggtatttggagtagatgacaatcaggattataataggcctattatcaacgaaaaacataaaggtttggtaaaagattgggctctcaactctgctgcagtagtaatggaagaaagaaagccattcagcacacctgggtttcataactcagaggtatgcatttcttttttatgtgcataaaaatgtaagttttcatcatttggaagttattttaactattgatatatatattctcttgtgaaatacttcaaaaactacattttgactaattgttatttttgaatggaaacctacaacagttttggcttagttcttaattttcatcgttctttcaaagttagtgagcaaaataattacaattcagcaaggaaaataattacaattcagcaaacaagtaatacactgcatattcctttttgtaagtagcatgagacaaaacaggaaatatacactggttatactttctaggaggaatgtgttttgaattagaaggccaagtcaccaggaaacatgtgaaaggtgcaacttatacacacactatagtaagtaccactgtggtacaagccaggatgtaatgaggataagaactgagatagcgccgggtggtagtggcacatgcctttaatcccagcactcaggaggcagaggcaggtggatctttatgagtttgagaccagcctgttctacaagagctagttctgggacagcctccaaagtcacggagaaatcctgtctcaaaaaaggggggggggagaggaactgagatactgagatagcttgattggcacagctatgacattagaattccactccatcttatgtatcaaaagaaaatataaaaaattgtataagttggaaatgtatttgttcagataataggcagtaactttcagtgaaaggaagccttcaaacttttacaaataaggaaaatgcagtaattaccctatctggggtcttaaatcttgtcatttgtagagctggaatttgaacctttatatgaactatttattttagtttgaaagagagaaggtgtgtgtgtgtgtgtgtgtgtgtgtgtgtgtgtgtgtgtgtgtgtgtgtgtgtgtgtgtgtgtgttacatatgcatgtggaagtcagacaagaacacaaatgttttcctgtgttagctctctgccttagtcctttaggacagggactttctcaggcacacacagccatgcccagctttttatgtgggtgctgggaatttgaactccagttgtcagacttatacagcaagtgctcataatcactgagccatctccccaacctgaccttgctttcttaattcattatcttactcattacattatgtttctctaaggaaaagagttataataagtgagtggtggataaacatgaaatatacataaaaattcattatgtaacattgctattttgtttctatttttacaaatacaaatgccattggatagtgttaaacttttcctctgtggcttgccattttctgaaaattgtcaaagtaattgtatcttttttcctttttagacaattttctagtttctgtttaattaatccctgaaaacaggtaatattaatagtaatatcaggcaatgtgttgatattttgacaaatccagggaaaggttttagtgaattactttagattccctctcctctcttcctcaatccatgccaagtaaaattcatatagctccaataagttcctgccattgcaggcctaagaggccactaagaacaaacaacagtatgtcctaagtatataatagtaaaactgccctgttgtgtatttactcagcatggtgcaggatggtctgcactgcctttagtgctcagagttgtgggcaggtactgcaagaccttggaagggagttcaagaagtcagatagctttggtgtccttttatctaaatacatcaatgtctgtgcttgactattttaatctgttcttgaaaccacaaagcatattatctacatgaaatcattacttcatcagtgtctaaccttagcctgtaactttgtttgtttgttttaaataaggtatatttcaaatagttcaaaataagctttctgttgtagttttccatttcctacttggcatgaaatttcagttttggtatgaatgcctgagttaagttttgagtgagaggtgtctttttattctttgttctactggggattgaatctggccttgtgtgtgctgagcaggtgctctaccacagaactgtacactgccagcactactaccaccacaaccccttttttctttaattttagtaggtttcacaggctgctcttacctcaagcttgtggcttgagagagatattttttatattacccttggcttaagaaatactaaggtatgttcatgagttaagggacctatatacttgactagacaggttcagaaatcatttgtcttaaaagcaaatctaaacacaagtgggtctgggttcagactggatctagaaaaatttcatagagcagcttaaatataaaaatctcaggctttgggttcttgaaatccattaagacattaattacctagcatatttgataattcctgagacccggagtcaacctgatttcctagagagtagcagactagcagattacattattgtctcttcagattctctgttccttttaatggagtcaaagtgactccagtgggctagctgcagagatgtgatgtgcagtaaactggaagcttctggggttgtcctggtgctgttgctgtataagcagcacaggaaatgatatactaagttcggtggtggtaaaatctggttgaaaggagcagctagagaatcttcttagacatgaagagattcaatgaagcataacaagctgagcttcagacatggcgtctgtgtcacatgatgtgactgaatgcagttctctttcatgagagtcagcattggcaggactgctgcgttgcctcatcctcttttcctcctttaggaagggatgtcttcatctggaagcaagcgttgggtttcacaatgggctagtttggctgctaatcatacaaggcatgatccagaagaaaggttaatgggattgtctgcaactgtagaaaacggtaacttcttttttctcatcctgctccagtttttaccttttctgtcttttttataatacatcatgggcattttaaaaagaaataagctaaacttaatgtagtagggagtaaattaagcttaaacatattcttatgtttgaacagtatgttgaattcaagtaaaatgctagattttaattaacattttgtgttttagggaattaaagcagtagaaagtatctaaataatacaacctttctttttccccaatgttggaagtaaattgaggagctcattgtgtatgttatacaagatgctgttataccacctacccccaagtccttttcccttaaaaactttagtgtacatcacaagttgaaccttctaaagacaaaaaaagcaaactaagatttaatagttcatttttaaacactctgatttttttattgtaaatttttgctattcatgtataattttaaagcttcatggttttacttttcagttaaaaaattacttgttgatatgccaatctattagaaaatacgtaactatcactatagtgtaatcataaactaaaaataaggtggtaatttgcaaataagctatatatgtatgaatgtatattatgaattaagttgtcaaaatactgatttaattatttttcattatgtttataagtaataatgtcaccttgtacccataaatatatagaattctaaattgtctattcataatttttacaattagttttacacaagtaaagactcacttacagaccccctcaaaaaatttttttaatatgaccaaatttgttgtctctaaatatttacttttgcattgggatctgctaagttgaaaaaaaagaaagtagtcatttactttgataagctgccttaatataccagaaaattacagtttaaaagtcccttggtatataaaattatgatatatcctgccacttttttgttattttcacatttttctattgatatagatttcttttaatgccttgctaagagatcaggtgcccccccccccaggaagtacaaatttcccacagtgatggcattcattttatactgaggttatttttgaacttatatctcaaaatgtagtataatttgacattccttttatttgtgttcttttgctttaatgaattcctgctttggtgttttcattttatagagacaaatactggtgaagttggtatttcactgagaagtactagctctgcagcttccttggctagtcagggagagagaaaaagacgaactcttccccagctcccaaatgaagaaaagcctctcgagaactccagagcaaaggtagtaccacagaggtcagagataggagagaagcaagacacggaactacaggaaaaagaagcagctgcccaagtccaccagaatgagaagcgtgctgcagccaaaagcctgagtcaagtggataggccagtcaatggtgagattcctaacactggtggagacaataaagccctccctccctcaggtagctcttctagtaaagagaagagtgaaactgataaagaaacttctttggtaaaacaaacattagctaaaatccaacaacaagaacagaaggagcaggcccagtggactcctactaagttgtcttcaaaaagtgcttcaggccacatagataaatatagggaggagtcttctaagcaagagtcccaactcgtagaaaaattgtcaggacactctacaagcaaaggagaaagagtaatacaaaatgaaagcaagagaagaaaagctgaggaaattccaaaaagtcagacttcaaaaggagacaagaaagagtcctccaagccgttagtgcggcaagggagtttcaccatagaaaaacccagttcaaacatacccatagaacttattcctcatatcaataagcagaattcatctgctcccacttccttagcattggcatctgcaagtagacttcgagaaaggagcgactctttggatactgattctagcatggacacaaccttgattctaaaagacacagaagcagtgatggcttttctagaagctaaactgcgtgaagataataataaaactgatgaaggtccagatactcccagttacaatagagacaattctatttcaccggaatctgatgtagacaccgccagtacaattagtctagttactggagagacggaaagaaagtccacccaaaagcggaagagtttcactagtctctataaagacaggtgttccacgagttccccttccaaagatgctacaaagtcaggcactagggagaaaattgaaaagaaagcaaaaagtcgctctacagacataggtgcaagagcagatggtcgaaagtttgtacagtccagtggaagaatccggcagccttccgtagacttaaccgatgatgatcagacctctagtgtacctcattctgctatctctgacattatgtcatctgaccaggaaacatactcctgtaaatcccatggaaggaatccacttacctcagccgatgagcacaacatacattccaaactggaaggaggcaaaggaacaaagtctaagacttctcctgttgcctctggttcatcaagtaaatcgaccactctcccaaggccacggcccaccaggacttccctcctgcgtcgagcccggctgggtgaagcttccgacagtgaacttgctgatgctgacaaagcatctgttgcctctgaggtgtccaccacaagttccacatcaaaaccacccataggaaggcgaacaatctctcggattgatttattggctcagcctcggagaacaagacttggctcattgtctgcccgtagtgactctgaagcaacaatatcaagaagtagtgcctcttcacgcactgcagaagccatcattaggagtggagccagattagtaccatccgataagttttctcctagaactagagctaacagtatctcaaggctatcagactccaaggtcaaaagtgtgacctccactcatggctctccttcaggtaattggatccagatttctaataacattagcatgttctctatgtgggctttttatttaaaaattaaatttctagctgtcttagcaaagtaattcaaaaataaggttaaaattagagggttaatgttcttccattaaaatgtaaaattcagaagtcagtgtaattccaatgtcttatacaaagtagtgatttcagaataagaaattaactgaacagatttaggagttttaattttttatttgataataattggatttgtttgtcagaattttattaggaattactgtctattctaaaagtaatgctatgcttctaaaatcaggtatttcaaatttcttatggacccatggagaatatacattttttcagtcaagatggaaataaatagcagatgtaaagaaatatgtttcatatacttacacattcggggttggagctcttgaaaattaactttaatttcagtgggagaaaccagattcatagggggattgctaagcatatatggattaaactaaattggaaagttaattaattgtgagcattatctcacaaagtcctgttgtagcatttaactatagtaattacataactgaatataattgcaatcactacttacagtctcccagtattgaagtgatattggctaatttgtctgtatttaagctgaagccactgagagagagtatatgaccacagcagtgaggcagctagctgattgtgtgtatcctcatataataagcatgttcttattacctcacaatcagctgcatatgtgggtgaggctgaaaaggccgggaagggtaaaccagtttgaagccttgaaggtttatgattctttcccagcaagctaagtgagcctaagtcttgagttaaagtggaggaacgttagtatataaccttccttttatttttgcttgatttataagacatctttcatgattcaaaactagtattacttcataaacggtgtttttgtttttgttttttccacttcccgttcctccttttcactttgctttcatccattctattttcttttcatctccattggtcagtggctttggtaatgatagttgtagactgtggtaggactggatataaaccaaaactagagaatatatagccatgcttcctgaaggataaatggcatttgttgttctggtctgtttccacatactagtccttgattgactattaatgaattggttgctaggtattgttcctcatttatttcttatggccctcccttctcagttcattccctttgctgcactctggtgtgtactctggtttcctctgaaacactgcttgctttaccacctcacctccatttaagcacattaacacattaacatgagtggtgatggaagttgtttggtaacatggagcatgaagtggctgcttctctgctgagtgactagctcttaccatggggctaatctagctttattccttattctttagcatgaggggcttatttaagatgtggtctaaataggaccacttggcaagaatgagaaacaagcataagatttcatatcatatatagacaaattttgatttctgctttgaatgcagatcttgatactcactttttgttatctaaaacaaataaaaagtcttgggattccttaatgaaattcccaagggaaaattgttactttcgttctttatacttagtagtcagcttttacataactccagtcatgaaatttaagagctatctagggaactggtgccaggagataaaataatttgccctggtcagatgtcaggtcagaatgagaatctaggacctttattactggctgttgagaaatggaactatatgctagcttccagaagacagctaatatcttattactagaagcatatacaagctgaatataaagtataatagtttgggtgttgttcagtaaatcattgaaatcatattatccagtccatgtcagtgaagaatgtactaaatagttgttgcatggaattattactaaaagatttatgtttgcttttaacaattgaatatctttgatgctataacatttctatttaagatatattatcttgagtgggaaaagagaagaaaataaggcttaaaagaacatgaaattagctgggcattagtggcgcacacctttaatcccagcactcggaaggcaaaggcaggtggatctttatgagttcaaggctagcctggtctccagagcaagtgccaggataggctccaaagctacacagagaaaccctggccgggggggggggggggggggggaagaacatggaatcatattgatcaatgttccattctccttgtaaactttaaagaccttgaagttatctaccacctatgaatctgtccatattgacatatgtaaaaaaattatttttgattcagtattttctttcatataatttggtaagcattgatgactggaaatgtatagcaacgttgatagcaattcttttatgcatctctggtactatttgcttccaagggctcaatgacttgcctttctcccatatttttttggtgacaaaggaaatacccagctttattttggtcaagattttggtatttaaaattaaaggcccttagttatcaaaataaagcagttgaccagctacagtggttaacacccataatcccaagacttcagtaaactctaggccagcctcggccacttaatgtgttccagatttggactgtctagcaggaccctgtgtctaaaagctatatgctactatgaatagcagcaccaccactactaataaactatctggtgttcattattttgagtgtacaggttaaaaggtttattaatatttttaaactttttcttaagtgtcttccattttattctaaatctcaaagttaaagtagtggaaattaaacagatatacatggcttttgttaattcttctctcaagtgaagaatgaaaatacaaagtattctgagagaaatttttctccccaaataatcttatcatttaatacttatagtcaacaaaacttgtttgtgctttaactcccctctaaaatactctgatatgtaaagaaaataaagtgttttctaaccttgttttaaatctgtaattgtattttaagattaatatagctttagttacattaaaaagaagcattcacagctgtgtactaataagcccatttttattctacacatggataatagtatttttgtagtaaacatagtttacaccttcatcaagaaaagaatgtacattttataactaaaatagttttttggtagtgtaaacagtacatcatttattgtcaaattaaagatgaacaaataattttatttctcaaaggaatatataaatatatatgatatgcacttatgcactttcaagacatataattctgtttgctatgttaaggttaatttaataatgttataaataaattagtttctttcgacttacaagtttaaagtgatcttgaaacttgctctcattgtaatatgaataactagtgcttcaccaaccaacaaattagaaattggtatttcaaacattcccagtatattcaatctagtgatctataaagtgccttaataagatcactctgtcaaatgaacctaaatatataaattaaatgtatttttgtaaacagaaaattcaaaagaataaaagtatttttttatttaatctgaacaactaaaaggcagaaacccttttatattttccttgtcattccactttctcttttttctcccatatgtaatgggtttagagttggtcttccatgttcagttaagcctttctagaaacctgcttatggacaccccaaagttgtgtttgcttccatggtgattcaaaatcctgtgaaagtgatgatcacatcaccctttaggaaaaaacaaaacaaaaccaactatctatatatactttttacagtgagccatgaactttttctacatatgtttattctcctacatccatcagtctataccctaacccaggagctacaaatagggcattaatgaggacagatgaattggctctgatttattacatacatttctatagatatctctgctttaagtcatctctggttgcagtgatggcagttctatctaagagccagcccacatcaaggaaaatagaatttttgggaagaaatatcaagaaaagtacaaaattctagtggacaatgaggaaatcctgggcttcacttacctagtatatgcagtaggtcaagttcaggattgaagagaaagaaaagtcacaaagcattagtggcagttgagaattgcagcagttgctaaatatttttgtctctttgaataccaaaggcatcccatgattctagatttataaatgcaaatgatgtctatccaggaatccattcattattcaaaaccaaaaactattcttagcacttgctagccagatacttgacccaagtgattgatatatatatatatattgttacatccacatttcctgcccttgtgaagcttaccatgaattagacatttctctgttcttccctcttttatactttacaaattccttgtattagtaaaatgtccacattaatttgtcttctgatttttttttcagtgtgtcagcaataacatatttaaatgtctttactaactgtaaatgagaaagtaattgccactttctttaatgttactatctgaatgaccttttgtgccttaaatgtcagtggttgtgagagtagcttttatagttttacgctttgtagattttacaccattgtctattttgactgtacgttttcagtgttaaagcagcaaagagttgtattgaagatgctttgttgtgttttttaccatgtaaaaagattttttccaaccatagcgtaacaggatgttgaatgacagaggtaatgttttttttttctgccataaggcataatttctataacaggaattatgcacaattgtgtgttgggaaaagagggtttcatcgtctccgtgttccaagtccatgtggcatgaggaaatcttttccctttttattttcatcgtgttagtgttgttgctgtcatttaaaaagcatccatatctctactcaagaaatatttgcaactgagaagcacccatgttaaacatttataactagagcttgcttagttgtttatcattagtgaactttttcatctgaatgtttattcactacactattaaaaaaacacggtctttcagttgtttttaagtattcattgtttttaatttatcaaaatatgtttctatcttaaggagtagtagactacagttgttttgtgaggtgtgtatatgtcagtaactgaaacttgtgctatgtgtgagctctcatggtgattttgaaatcatgatttttattttgtctttttaaaatgataatataataattctttttttaataattaaactaatttagtaaattcaagatggaggcgctttcctactgattatgcttccacctcagaagatgaatttggatcaaaccgtaattcccctaaacatactcgtctacgtacttctccagccctgaaaaccactcgcatgcagagcactggatcagcaatgcctgctagttcttcattcaagcaccgaattaaagagcaggaagactatatccgagattggactgcccatcgagaagagatagccaggttggttttcaatcttttacaagccttgtgggttgttgggggctggagagagctggctaaagctagcagttaagggctaagtagatgacctgggtttagttcccagcacacatgttctcagctcatgactgtctattataaccataggctcctgctttacgcagtgcacagacatgcactcagaaacacacacacacacaaaaaaagaattgagaaaaatagaaacattactggttaataacaaaagttcccttctttagtataaattgtctgagaaatgaaatccacagtcttaattaaatgttaatttaatttataaataacagtgatacattaatacactattaatatattaatgaataattaatataattattaatcccccttcccattttccaagatttttaatagagatgctggtagggatagcttttgaaagatggtataattccacatagttaatattagcttgggcaatgtacagattactttatttttaatctaatctaaatgaataatctgtttcagatgggctactattgttactggacaactttgaataggcttttttttttaacctttttttgttgtttggtttttgagacaattttgctataaaatttaagctgaattggccatgaatttgggatcctctttgtagacctcaaatgttggggttataggtatgctctaccttgcctggttttgtttacatttttataaattcattaaatgcagttatttcagccttttagttaaaacgcgactattttgaatagtaaatgacttttttataacctttatatagtacagaaggtaaagctcacattgcacatacaattagtaacagtgcagttaaacattttagattcaacagatgccatagtagccaaaatcttaaggattttgtctttctaaatctaagattttaaaattttactacagtattcttgtgctgcccaaacatttctactatgttatatgctaattatctttgcgtttccattaagacagtaaatttttacctagcaatattaacagtgtatgtacattagtcccgaatgctttcagagcagcagcaatttttaccattctttgatgttttttctttgttaccttttgtggtcaggtttttaatgagactatgtactaaaatgtttagggcagttgtttaattagagaaaaggaatctgtgaatcatgggcccatttatgtatgtaatcaagaatcctgacatgctttctgttctgatcacagccgccagcatgtcttcctgtgggcttgtctttgtctcctctggctacacaaggtcaagtggtaccaaagggaactagaacgtgtctgtctcctcagaaggctatcactcatactctctttgccataagttagaaaaaccaaaatccttttatttggggggggggggtcaaacctttcattaatccaaatagaggagagtgagcttaaaagaaggaagatgacagcttcaaacattgttccccttggttttatttgttgtgttggtattgctgttgtctctccaagaggatattaagcctaagctgttgatgttaacagttttcatccctggttacctctatttttttagtagactgtgttaatagtatctagcctttgagatttttcatttttaaaagaatataagccagagaactgttccccctgcccattaaaaaaaagtagaagagggaggtcgaacaaaactatcgggggggggggggagaaggatgggagttgatgtttagtgctctaatggagtaataataagttagaataatgtgagaatagttattttcaaaggctttaaatcaagctaaataagagaagtaatttttttttttttttttttttttttatggaatgatactgtcacctaaacaaaactcactaagcagtgaagaatacttgacattcttgaaatagagaaatgtaattttaaactttattacaaaaatggtttatgctctggttgatttatctcttgtcttcttttaaatgtaaaccagtttgactcatctttctttatctgtatttaaataaaaacaaggttaatccagcatagaaaacatataagcaaaatacagcatagttggtctttcagtttgtaaagaaagatttttctctcagatattcctgatccatgtgcctaagtacagcataagagaaattttcttccagcaggaatttgataggttttagtggttttataaatactatggtagacagagctagagttttacctttgcaaatgaccaaatacttttttttaatttgaattagaaacaagattgttttacatgtcaatcccaggtccctctgcctcccctcctcccctaccgccccccccccaatcaaaaaccctatcacatatcctttctgctccccagggagggtgagtccttccatagggagtcatcagagtctatcacatcctttgggatagggctaggcccacccccagtgtatgaccaaatacttttaacagaaaaagttatactggaagattatataattcatatttgaatcacaaggaacttagaagtattgtattttaaattcaatattacatatgttttatatcagttatactttgaaaagtatagtcaacagtgtatttagaaaaaaaacaaccagttaattacagataattacattaaatcattttttaaaaagccaatatagtattttatctcagcactatgatttgcaaatattatgttcttttttatatatacctctagaatgctactttacatcatatttatatatacttgagttctttatatgtgttctatatattaattcaagatttttaagtgctcccatgaggataacatagtcatattttagtgctgaaatgtaagaggccagttggagttgtaatcagttgtagaggtcattcacaaagaaagcaattaaaagccatggtactaaatggtattacaagaaataggtggtcacctaaactatagagctgaagaataaccagatggtccagaaatggactataaaatcagactagattcatatcctttctaccataaactctgtaaatctgtggtcagtataataccagtgctagcattagtgattgacattgataataagttaataattaatgttacactttaagaacagaggaaatagtggtagtggattttcattagggcttttgttttctgtttattccataaactttatgagcatccacttatagttggagtttaaggccaacattatatttaacagtttgtaaaatatttttcaatagactattatagaatcatgaccaaggaaggttcatatcttctgtccaaactcaaataactttataattttgtattgttctcataataaaaatattttatataacttttctatggtttcttagtactaaaaataattcttaaagtgttttcttaaacttccagtatacttgtaagtctgtaataatgtatttacagtatatggtaaagaaaacaaacctctaatgtattaaataaagcaggtatcactaagcagtacatgcataaaaaccataaacttgatgacccaaagtatatttttcactttgctttacttttgagacagataatttcttctacaaaacacatgaaatgtggtggcagctcttatcacttggtatagaaggattatcagtgctcttcatctttgcactttatcacttgctatagaaggattgtcagggctcttcatctttgcacttggtttagatttttgatctttgggatgttctcttaaaattttgtattaaagaaaatggaatagaatgtgggattgtatattaggttttaaaattggcaagtttaaattttttatatttgctaaggaaaccatattataaatggcctcaaataaaatatactattttgggatttcttgtagcagatttgaaggggataggaatgagaggagtttgtagactgggagtttaaaagcagaacataacactacatgtaaagaaacaaatgactataatccaatagatatatcaagaaacactataaagttggaatgctctagtttggtgaccaaatgacttagacccattatctagattgaacaggtgctttatttctgtttgggatatttccataactcttttctagtattttcctctcagattttcttgtagtgatttgtttagtgaatggtaagggcttggttgtgtctttgacaaggtctcatgtagttcaggctggcctcaagcttaagctgcaagtgaccttgaattcctgattttcttgctttcactactcaagtgtttatattagatatgtgccaccacacctgaccagctacttaaagtcttactaataggttgttatctcaatcaactttaaaaggagaattacctctctaaggcacagtagtcatgtacagaagatgccgtcaaataaaatacctcttgaatattattatatggtgtacatacatgaggatctcttatttttacacagtttttccttctgagacatgaggataacttattgcctttttattcttatcactttcaatgaatatcatgtttcattatataagtatctgcaaagaaaaattagatttgtttaataagtaaactgatgcttatgtttttaaaatcacatctaacctttttattctgtttctcagcctagttcatttatttcaggaaagaatttataatccagattgggcattttatccaaagtacttgaaactgtttgtggtttgagttttttagaatggtttttatatacatggtgaggtatgttgggaacgaaaacaattatagacacaaaactgattttgtgtgtgctttatatacatagtttgaagataattttacatgatatttttaatatgcctgagtttgactgaaacttatgacgtagaatcaggtatagaattttccatttgtgctgtcatgttgatgcttaaaagctttgtgttttgaagcattttagatccagtaatttcagtttaggtatattaactctatcttacttaacataccccagcttattctcaatcacatcagcagttaagtttgaaaaattgcatggtagtgcggtataatacaaaggtctagtgatattcttactctctgtgtccttagcctacaaagttcacattgaattctaagcttcatttttatcactggtaaaacaagatgataaatacctcacttagaaggcttttgtgaagaatagatgagatggtaaatgtgaaaattccttataatggtactcattatttattctaagctccagaagagcaagggaccctgtaacttcttcagtgctgttccctcagggcacagagtagtacctggcaaataacaagtgatcaggaaatacttgttggtgtttcccctacctttttgcactggcataaaagagaaaagctgcagtttcttacaaggaaatagacacacacactcacacatacacacactcacatactctctcacacacacacactcacactcacactctaaatcaccttacatatctgtcaactcataactttcaacacaacttccttttaaaattggttaaattttttacacaatcactgtactccttgaaaatcttttgaacccacatttggggactggagagatggctcagaggttaaaaatatttgttactatcacagaagacccagatttggttccttgtgcccacatggtgcctcacaaccttcataaacaccttcttctgacctctgtgggcattgggctatatatggtctgtgcacacacacgtgtgcatgtacatatatgtatgtatataccatgtttacatagtaatacagtcaaacattatacatatacatctaaaataagtttttaagaaatatttaagcccacattttatataactttttaaatgtttctttgtaccttgaaagttatttaagctttcacatgtgtttttaaatatattctattattctagagccttctctatggaagaagccaaattgagttttatgtccaacaaatatagaatgtggaaaaattctaagattaaaaccttttttaagatatctggaaataccagtaacagaattcttttatttctcttttttaaagaatttcttgaaatgctatgatgaaactgttttcacttttgtcactactgaccagaactgaactggaggtgtgactggtagagtgcttgcctggcatgctagggagccaaatgctgtggtactcaggaggcagaggcaggacaattgctcaaagttacagccttcagactagccaagtactgtgtttcaaaaaacaaacaaaaaacccacagttacttaatgaacccatgtgagtaaacccagagagcttcatagacttgagtgatataaactaagatctggtccttcctactcatgcaatcttaagcaggtcacgaagcttttctataatagtgtgtttattaacagattgagctaagtcctacttcagaagaacattatagccctcagatgacatgatggagagtagaaatgctgtcatagtgtaaaatagtgctttagagttcttgacttctcattgccatagtcctcttcactgaagcttgggaagctatcttagcatttccaattgcatgactccaactgcatgaatagaattacaaagaatttcattagtgctgggatatagttacaaaaatatttaacgatatagtaactgatggttctttagtaacaaatttagtaaatatcattagtttgggtttttaatggctctataaatttgtaaaagtaatcactataaatgatgttttgagatgcctataaataactatagtgtgatttctgttggtgacaaaagtctctagtcttattaactccactgtagtctgttgcttgtatttataattgaaatgataagcatcagttaggttaatgaaaatgttatccatgttcagatacttcctggattctgtcatttccaaatttaagatctctatgacatgttaatgccaacattaacattaactgtgtattttagagtattcaaaatgtatttctcaagatagattatttggaagttaaaggtgtgtgtgtgtgcgcgcgtgtgtgcgcgcgtgtgtgcgtgcgtgcgtgtaccaaaactgtaaagaacaatttcaaataatattaaatttgggatataaatctgtaattgtgcatatagattacatgagtgagtgtcaaaactgattgttgctaaagctgttacttaaagggaattaaatttcttttctaaaatgatttgtaggatcagccaagaccttgctctcattgctcgggagatcaacgacgtagcaggagagatagactccgtgacctcctcaggcactgcccccagcaccacagtaagcactgctgccaccacccctggctctgccatagacactagagaagaggtaggagatcttcatggagaaatgcataaggttctttcttttctcaatttcttttgcttttagctttttgcttagtttattttagttatgtccatcctccctgtctgcatgcagctctgtgttttccaactgtgctttaacaaatttatgttttataacaattagtaacagactaaaaggctaatatttggtctactattaacatataaatggaaaattatttagctataagcactttgcctgttgattcctgatctgtaacattacttgaaatgtgaatgtaaatgttatttggaaagcaaactgaagttcaaatgactatataaagtttcagagaagtttgacatgaaaaatactccaattaaaagaaatggtcattactagttaatagcaaagaaagagcaaaattctataacctttaaaaatagcaattctgttgacagatatacacagtattgtttttaaaaactgaaatgtatattatacaaatactatctctctcacttatacacataagtactccaaatattcttacaaactctagaatataagttagaatttgtaaactgttggcctcccaaaaccatggcctccaccagtacagctccaggagacaccacttgcataacattgttcctcaaactacctttatcttaaaactgatgatacagtggtctcttatccctctgtattgatggagattaattcccagtctcttagataaaatagtacagagtttacatgtagtctatgggcatccttcctctttacactcatctctgggttatttacgaaacctactatagtatcaaaatagttaggctgtgttgtttagagaatagtaagtgacaagaaatatgtccatatatctctagcaaacacacagcatttaaaaaaatattttcaatacttagttgaatctccagataaggaagattgactatactctctagccatgttgactgtttttatcttgagccaaagtataagccaaagggttagcctttaaagggatgagtttgtctttatatggcctaaaaactagagatagattttgtttttaaatgattgaaaatatgaaaaagaatagtgatttataacatgaaaatcattttaaattcacatttcagtaccataaatttttattacagtatagccgttctagcttgcctaactgttgtctatggctgtttctgtgttgcagtgcaaaactgagttctaagacagactgtacgttgcaaagccaagaacatttactatctgccactttatagaacaatgctgccagcccctcatactgataaccccacttctttatcttacgaaatgttctaaatagtaaccaaacatgcctagccttttggacatttcattctggtaaactgtgctgataatcttttcttcagttgctttttgtcacatttttttttcttataaagctccttactggtcacttcttatttattttttgtttgtatgttttctaatttaataaatgatatttcattaatctgtgtagagttttgttaccacactaatcaattgtaaatgtatataaaatcatcttggttggtttttaaaaaaaaaaaatcatggtggcaagacatacacatgtctctggtacatttaaataatgttatttttcttagctttctaactaaattttacctaacatggttattcattcactgagaccaggtagaattactgaaatatttcatggactagatttccattcttcttttgttttatttagaatgttacactagttttcttgtcggtaaacctgttacttggtgttgcatgtccatagtctgcactgtaggtggcaggacaccatttttactataggaagatgtatgttctctatcactgttaaaaatttgattaagaccaaaatacttattattatgtggattaatttttgtttccttatgtaaacttaattggaatttgccatttatgtatcttgtgaagaaattggcacctggatttggggaggaaaaaacaagatagaaaactaaaagaaaaagaaacattgttttatactggtaaggcaaagtgagtaaagtgaactcattgtccacctacatggctcagaggtttttctctttagcatctgtttttcctttggagaacatcttaatcatgaaagagttgaatttagcatagtttttggttctgaaaataaaatcagtatagattgaacatctactttatggaagaaacctgtttggcatgcttatttaaaaagtaattggtttattgaaaatattctgttactacttgaaaatgaagtaacttctctctaatataaaaaagtataatgacagtatttctacacttgctactatctgttctcataagactttgcttttgtcttcctagttggttgaccgtgtttttgatgaaagcctcaacttcagaaagatacctccattagttcattctaaaacaccagaaggaaacaatggccgatcttgtgattcaagacctcaggcagcagagactcctgatcacttaacaattacaaggaggagaacctggagtagggatgaagtaagcaaactgcaaacttttaacatatggggaaaaggcatccctactgtgccattaggtcccagttactttaggggtatcaagtttgttaatacattattaaggagaagagttgtccaagctaaactaataatgtatttaagagtcaagattaattctaagttaacctaaaagccaccatttataaaactattaaatctttaaaaaatatgaatatggaactagaaaatggctctgcagttaagagcacttgctgctattgtaaaggacccaggattggtttctagcaccaggatagtagctcacacccatgtccagtcccaggggctctgacaccttctgatctcattgattagcaaacatttatgtggtatacatacataaaggcaggggaaaaaaaacattcatacacataaaaaaaaccctttttgttattaatgaatatgttagtaagtaaagtggtaaacacatgggtagagttttttaaatcatttgagctcaggagttggagcaggctgggtaacatggaaagacctgtctctaaatgaatgccagtgaaaaaaaagaaagaaaggtttatgccaatggaaaaatagatggaaggagcttagggaaaaccgggcatgtagaggggattttttttcttctaatgtataagcagtttaatgaagtttttatagtgactgcaaagaaagtcataaataaagacatgtacaatacattggcataaacattaggtaggtgggtaaaacaaagagagtaaatccctataggtctcagatactgtttgattatactgttagtattttgattggtgagggctagatgtttgtatgttccaaaggattaacattgatgttagctcacatacagtggggggtagtaaaagatctaaagatggcccaagataattataattcagtgactctagtcactggaattctagtcagttaattggacttgtagaactttctgaggaagctacaactcctttccaataactttcattcaggctcattgaggaatgatttgtcagccatggccacaacaccttataaagctccagcattttggataaacaattgctgaaagaggtttggttcctagaactaaaggaactagattcttgtcctgccacaccctgttagcccccagtcaagaatgataattgatcacctgacgttctttaactgagtatttataggttacccttagcaacagccagctttggattgataaaaagacacttttcttccttccttactctttctgccttataactaccccagccaataagcagacagcaggctcttattcttacaccagaaactacctcttcataccctccaaaaaggcctacaataaaggcttggtcccttgtccatctttcttccatgccaactttactaaaatggtgggtgttaaccccaaagatccaaggagaatgaccacagtcccaaatattcatgactaaattaaagcaagcaattaattaaagctagcttttttatttgtgtacatgggctgcctcccccttagagaggtcagcattggatgtaaggaagacaagggttttatagctcaactgtaagggatttccaaataggggatttggtaggcaattaggtagagttatagaagcaaaacataagaattgcaagttagtcataaggaccacttgaaacaaagacatgcttgcagagtagtcataacaaccaatagccataggtggtcaaaataacattttggaacgaagacatggatgctgtttcctggagcaggctatacagagtcatttgtagttaagcttatatatgaggcatatagaccaatcttttttttttatattttttacatgtctagtcaacatttttattctttcttttatgacattcccactggtgaactttgaacatatttcagtggggctactaatttttttaacaaattttattcttcacgtgttcattatataagtcacaaaattttctgttcatttttatctttacttaagtgcttctctttttgtattgcctgcatatgacttttaaatctccaaattttattttttttccaactttttttatttgaattaggaacaggattgttttacatgacaatcccatttcccttctcctacccatcctcccctacctgccccccccccactaaaaccttatctgtcacatatcttctctgtccccaggaatggtgaggccttccatagggtgtcagagtcttttgtttcctttggggtagggcctagacccacccccatgtgtcttgtagaggggatttttatacacacgcacacacaggtcatttgacacagcaccatgcaaagggcttattgagatcagtgtatagagcttagaggaagtctatagcaacaaggcactcacagtctgtgcttttggatccctgggttcaaggacctgtgtaccaatgttttgtattgccaggtgtgatggtatatgcctttaatcccaaggcttgggatgcagaggcaggcagaattcagagttcaaggctaaccatttctacataggaagtctcaggttagccagggctacacagaaaaaccatgtctcaaaaataaacagggaaaaatgctttatgttttatttgtttgtttctttatttactttgttgattctagagactgggtctcaggtagcccaggctggcctcaagtaccatggagctgtggttggacttcagctactatcctcccgccacttcctcacaaatactgtgttgtagatgtgctccgctatgatcagtattgagtgcttttaataatactgaacagaagagtcaccaaatgagaaagttacagaattgcagtgccagtccctgagagactttcacaacataatttttctgttgtaccctgatagtggttgttttctttttggtataaacacaaggattcattctcttaattttacccgtattctttgtgtatcctcaggtataaggtgacaaattcttctaaatgtagtaaaattttgaggaagaagtttatgttttcagtgaagtcatctcaaggttgatatcagaagttttaatacattgtaacactgacctataatttatggagtagaaaaaaagaaaccttgttctatagtaatccttccatagaatgctgtacctttcttcttcttaatatttatttttccacttttattccatctgtttcctcaaggcccgcaaatcccataattcctacttttcctttctttttcttcacatggctttccatatttactcactcaaccttctaacttcaatatatccagatcggtctgtgtcatgagcacttcctataactgtcatactcattgagcttactttacagttctcacagtactgcatcacaaaatctagagtgatttacctgctttcttacacagtatttaatagaatccctgtgttacattgttataccacgttctgttgctttttaaaaacattttgttatccaaagttatgtcttatctttctggcttatttttagagaatctgcatttagttctgatagtatagggttcttttggaagccacttctagaatcaggttgggtccttctactgtcttacactaaaagctttgtgttttgtgatttaggcctaactcagcttgccactgtcttaaacacagctcttaaacacagctgccatgctccatgctccttggcctcatgctgtctgtggctgtcttctccctgcagcagcagaactaagttgtgtcagagatcaccagagcctaaaatctcacagtaacattgacagaagtttgctgacccctagttttacccctggttctcaactgcagcaataccaaccaatacccatcatgaaaatttactactttgagtaaattctttaaaatttattttctttctagactctgaagaataagtaaataatatagtactttacttaccttttcccattcatgataatataaatcataaatatgaggcaggatcatgatactaatttaaaaggataaaatgtgttatttttaaatggaatgaccaaaataatagagaactttgacaatctatttaacaaaggaactcattgtgatgttttttttctgtttttctcaatttaattattctgattatatcactcatttaaataaaattggtataaatagtattaatatagttagttacagctagtattgttaagttattcagtaagtatttattatattaatatgctttttttttctctgttgcaggtcatgggagataacctgctactgtcttccgtctttcagttctctagaaagataagacaatctattgataaaacagctgggaaaattaggtactttgtgtttctctaatcactactttgtttcctgttctctctgcttcaaacctgttgccacagctgtgaaaagttagtgccatcactgctataatttttactgctgttattgacagttacttttcagctataaggatgtagtgttggctaaataaatgtttctagtcataaacccatttgtaattgagaattaacactttcaattattagtaaccaaagccatttttcttcacaaaatattagtaaatatttttaaattaaatttattcattgattgagtgacttatggctgtatgttatttgtagcattctattttgaccccttcacaattcagtacagaaggcagatatggaaatgtgagtgtctagttctgagtgaaaatgtactgacaagaaaatacggaataagactatatggtaacccataccaaaggcctttggggaaattcatagaaaagaagagtgagttgaagagagaagagaaaggacagggggcatagtgacaggcgaggaagggtcaatttaagcagaatttattactgagtttatgcttcatcctaaaatgtcatgggaaagtaataaatgagtgctcttctatacactgttgtccatgaaaatataacaggagtcacatttcatggtcatgtgtggcttgctgatgagaaggcttgagtacaacatacaattttatctctaccttactgaaataaaaatcccttctctaatagctagatccttatctgggtagtcactcacacaacatagtattttagactgcctgccttgtgccttgctgttgttgactcttaaatagagcatctggctcagtctgtactgaacccattcccagaatccctcacaggaaaatactgtgggtttcatatttaattaagcttgagtccagatactacatagattaataaattgactaattgatttcaatatttttgaaatttgacggctgagggaaactttaaagatctctatgaataccttaatgacataaataaatgttacatgtgtttgaattgccttccatgtgagctttgagtttttggtatgtgtgaagcttatggcaggctttataaaaaataataaagatgataaaatgtcttgattgtttttatgaagtttattactgaatgtcaatcttgacacagacatgatgaatcggtatataggatcatatttgatggattgctgtggagttaagagtaaaaggcaatagaaggaaggcagtatgtagccagatttttctttgggctgtcagctcaaaagaaatgatgtggaaaattactattagttatgaaaactcagctttagcttagatttgtttctaactagtccttacaacttaaattaacccatgtcttttaatctacatgttttgctttttatctttgtattgcccatcctgcttcctcctcctctcctcttcccagagttctctctctgcctggaagtcccccctatctctcctacctaactactggccattcagctttttattacaccatacacagcagcacatcttcatacagcgtacagctgttctacaacagaagttcactttcacctcagatacttggaaggggaggtgtggagaaagtactaaaaagtgtgtgtaatttctgataaacaaatctagccgggcgttgtgacgcacgcctttaatcccagcactcaggaggcagaggcaggtggatctctgttcgaggccagcctggtctccagagcgagtgccaggataggctccaaagcgacacagagaaaccctgtctggaaaaacaaacaaacaaacaaacaacaaaaaaacaaatctaaagaattcagagcatgggaattgccatgatggttcaggaaatgaccacagcttagaaacaaactcaagatgcccagtgaaaatctaagcatgtgcattcttaaatcatttgagcattcctactgtccagccttcttgccaccttccagtcttctagcttggtgacaattggccctcaggtggtaaactactgtttgcatcccagattacttgtattaaggatttactgtctatgggtaagacatttttctcccagtgccaacaatttcattggaaaaaaaatttaatgtactaattttaaatgaaataaggtttgaaatttactgtgttttcatggtggaaattagcctcaactactcttgaattttattgtaatctgatggccattgttaaatgaccatccaagttaaaaaaaaaaaaaagttttgatttacactttgtctaaaacaatctgctgatacgattttctgcttccatagcatccacatacctgattagagttaattttctaaaaccaaagtggtaggtttggcatcttatgattttaaaaataagatcttattcttccattaggacattgttttcattgaatcaggcaaggcttatatgtcctatgttcttttccccaacaaggaaacttttaggagttttagaagccatgtgtattatactcactcagtatcttctggaaaaatccctggatttttagcacatcattgctaaacacatacttcctttacaggcctattgtagttttcacttagcctgtggagttctccttgttttcttactttccataaatcttgttgctaaaaggactgtttgaaaaggcacaatacatttcttattccttgatagcgttgtcattaaatgaagctcctaggtgcctggcattaacattcagtcttttctgtttgggaaatttcttagttcagaagaattttcttctgcaagctctctacctttcttaacatggttacgaaaaattacagatgttcagaacttaattttgattactgtgtgcttttaaataacatttgaagaaataccattgagagatggctcagaggtaaagagcactggcctgagttcaattcccagttgacacatggtgactcacaaccatctaatgagatctggtgccctctggtgcatgcagacagaacactgtgtacataataaatcttaaaaaaaaaaactattaatatacaagatttattagagaacttaaacttaatctttctaaaactgctgacttgtattggagagagaattctgcttttagttgacaaaaaaaattatagtactttaaaaattaagaagtttgagtttctcatatagaacagttattttattaattctttttgttaaaagtatataaaactttacactgttttaactcctaagttatgtgcaaacacactaacatgaattaagaatttgaatagcaaaaaaaagaatttgaatagcaattcagtaagtagtctaattttccatctttaagataatgttcaaaccttgatccatcaaaaaagattgatggttcctgtgtaaagaggttttaaccaacagttgcatacctaattttgttttgcttaaactttgcatttctatcactttataaagttaagctttcttaagcattgggtataccactagttacaaataacaacaatacttctaaagtggaacgcaatatggagccaaatatagattgataaagggtagttaattaataaattatactcacacgcatctgctagccaggtggcagggagtccaaaggagcaagagaagggggtcccacgtgcgcgcccctcactcttaaacttttcccacatcactctgaccacgcctaagcaggcgtggccagcgacacctgtctccagccccaagagggtgtggccaggatttccccctacatacttctgttcaattttcagttaaaaataagataaacactagttttaggcatgtattaatatccagtcagttaggtttttaatgttttcacattcgtgaattgatagtgttagctaattattaattctgagatcattcaataattgttttatttttctttatgtagttttgaaatgatatcttgttttttatattatcaccgaaaccatgaaaggttaaaatgcttgtgttttttgacctttagaatattatttaaagacaaagatcggaactgggatgacatagagagcaagttaagagctgaaagtgaagtacctattgtgaagacctcaagcatggtatgatggcttttcaaaattaaaacatttcagtggcatggcatcattaacagggaaagaaatagttttgaatatttgttagtttacattctaaaagactgtatgaatgcatagattcagtaaatttcaaccagtggtggttaaaatatcagttgtttcaaggctgcagagagtactgaggaggatcttctatgtttctcacaatgatacatcttgttcctatgataattatacattataaagaagtagctttcaatttagaacttaattaagttgacatattgcttccatttacttaatacagtgtttatcttttaaaatgcatggatttatcggattgttttcctgtgttatgtttcactttatatatttttccaaagaaaactcacaggcacattgttaaaatgttgcaacaaatgtttcaaaaccttccttcctttctatagtagtaaattgccttgaatttctgttagtattattgaaaaaataactcagtttcattattaaagattcaaatttggagccaggcgttggtggcgcacgcctttaatcccagcactggggaggcagaggcaggcggatctctgtgagttcaaggccagcctggtctccagagcgagtgccaggataggctccaaagctacacagataaaccctgtctcgaaaaaccaaaaaaaaaaaaaaaattcaaatctgggttgggtgtcctttggtgtaggtaccaacagtactatagagatgagatgcattgcttgtgagaatgttttaggaagctaatttggagtattgctttccccgcaggagatttcttctattttgcaagagctaaaaagagttgaaaaacagttgcaaggtaaatttactactaagttaagtaattattcttctggatatggtagtataggatgttctggtggatgtctataatcccagcattcaggaggcagaggcaggaggattgagtttgagaccagctcagtgtattctatttctgaaaatgtatttattatattcttaattattaagatagtatttgactaagtgtaccaacatataaaagtacagagttgaatatatccaaattattcataaaagagaatttttacaactctataaaaggactggagatatagcgtcagtcctagaatacctgtctagtatgagtgaggccctaccttctattccagccatgtgacatgaatatatggatagctctcagtataaaaactaaaatactataaaattagatttattaaaaatcttactgttgctttcgatgcaaattggtctcaaactctttgtgtagctggagatgacctggaactcttgaacctcctccgactacctctgggtgccaccatacctggcataaagtgagatcatgaagatcttaggtatttatatttgacaaaatctgggtgttaaaaacataaccagtattttcattacctttctatgatggtaaaagcaagtttccaaaagctcttggcttttacccttcaagtgatagtctgttcagtctcccaaagtgtctatagaaaccataggggacataggaaacacatccagatctgtgtaatctacgatgtagattaaccatgggattattaaatcaggttaagtgtaatagtagaggactagctaaagtctgtcttaatgataagcagtgctcatatccatatgttactgaaaacagaattgcatctctttttacttctttttttttttaatttcttttagtgatcaatgccatgattgacccagatggaactttggaggctcttaacaacatgggatttcccaatgctatcctgccatctccaccaaaacagaagtccagtcctgttaataaccacaccagccctggtcagacaccagcactttgccccccagaaaccagggctttggaccctgcagcagctgcagcctcagctgagtttgataatgctgaatctgaggctgatttcagtatccatttcaacaggttcaaccctgatggggaagaggaagacgttgtagtgcatgagtgacattcccttgtcagagacattatgtgtggagtgacttggggtattggaagcagcatgatgtggatgtacaaaacaagagagcttggtcggcaacaatcttgttatctttgtctccttgatttatttatttattttcacctctaatgtgttataccagtcttttcaaaccactcaaacaaccacttgaagcacacttagcaaaaggcagattgtgtcagctttgccttttgtggtttcatggttttcaaattgaatcatatcactgtatcctttcccttcatagatctttgtgtttgtttgttttgagccatgctgtgacctacacactaaaatagccaacatttctgagcccctgtgtctcctgtgccaagctacttcctgagatgaacttctcatcagctgtacagattgttaaaccattcaatttgcttcttaataatagggtttatattattactcactgtcagtggactcagtgacaccatgctctgtagagtaaagcaaaccctccacagcaatcatcctgtttcctaagatttttccaacatagtgtgatttctataactgttgctaagtaacttgtcttggggtttatggaaattaactattatgtttgcactaagatttactgggagtgatagatggacatatctatatatcattaaggactgacttgtctttctgtacataggaagttaacaatactgtatttgttttaaccccacagtgttttactccacttttcaaaaaggtccatttggcacttttatcttttttccttcctttcctctctccctccttccctttctttcttttattttcttttgtaaggaaatcagatttttgtctctccttttagatgaaatgactagaaaggtcaaacttgacagatagtttaggtggagtatatttttaaaattaagaacatgtatatttatcctgtgttaccaagtttttatgtggcagttggggagggggagccctctgaaatgatcatgaggttaatttttcttcattaggagatgtggagaatcagtaattgtgagagtagttgatagttccactcccagtcattgaattgcttctgtgtttccctgtaggttcatagtaaccccgtgtcagtcttacacatttgtaaggaccctgcaagacagcaacgacgactaaggctttgggctaatagctactgtaaagaaagcctgtgaaaaataccttctttaaactttgtttttgttactgttttgttttctttccagtaagctcacatttcaataagtttttaaataaaggaattatttttttgtgtttccagaacactataatttgggtgaatcttaattcttttaaatattaataggcctggatttgcttcaatggccccattagtctataaagagtaaattgcaacttttatgatatggtctttgatatattagcaataacttgtgctacatttgttttaagggaaagttaaatgtatacttcaggatttttcaggatctaagaaatcctgtgctgttggatcagttaataaaactgcaaaatctttttgtaaacatgtaaaagcaagtctgctgtataatggatctccttgtattttttttttctttaaattaaaaaggaagaaaaggaaccgttctccttgtaaagctaaatccacaattctgtgaagtaaggcttcaaaagagttccaaaaaatataaggggagtgagatgctttgaagaaacaaacaaaacatataaacagggtcggtccatttgaagaaaaattatgcaaaataataaccattgttccctcctttagttaatgtttggtactgagtctgtccatatggaagtacatgagaaggaatctaagaaagtattaaaatgtatgcttacattattgtttgtttacagttttgttcaattataaacatttggccttttactatgttatttttattttgtatgaatacattctccttatttatttttgttacatttattacgttattttgttatgcatttacaactccatttttaaataaagtgtttctggaactttatgcagtgatacagaattcatatcttctaccatctgatagacagtacattcatcaatttaccaaacaactgtttacagagaatttcctaatgctctagcaaaggagccttccagtgctaatgactatatgatcatccaaaggaaatattcttagagaattataagaaatgcaatacagtaacttaatacttgagtgtaaacacacacaaacacatcatttgcagtcagccttggattatccaaaagctttctgacagtagaatattggggaacaaagaagaattttaaatatcttgaacatcattaagaactattgatttagactttttttcttcattctcaatagagctcgagtcttgaatgtcaccctgttactaatcaacatcatgaatttcacagcctgactgtgggctttttgtattctaatcttgtttatgtttctttgtacccaatgtaatttccaccggctcctacaagaccctggactatcctgggcatttcatccctctgtatacttattctctctccccttctctgctcacccacagcccccacatcttcatttctaacctacatcttcataaagtttcccttctttgacaccatagcatactttcatttctcctccccgtatgactcatgcatatgtacttctctttaaatcactcaaattgtctcctgggtagacatacccttgccagcttctgtactgtttagcttccttcatgtccttgggtttgcttgctatgtctctggcaggagtaactcttggagggttttggatttaatattttgagatccaggtttatccctgtggatgtggtcctccaactctgatctacaaaatgagggcatcattcttaaccaaggatcttgtagctcaggggactatgaaataagctcctgcaggatttctgtataaactcttctcattgaagtctcctgcctgtcagattcagttttgcccaggcagatctgatccattctatatagttactatcttcacatactaagcaggattctcatcacaggctcctggcagtgaatagagactgcccttgattctacagtgagagggagacactgcaagttcagagttgagtgtggaagcaacatcaggtgaaaaacatttttcctctagtaccatgaattactcacgggctgacccttggttgatcttgaaggacgtacatactgctttgtatgttcaaattcctttcagttcatttttattctaacctggctgtaaatgttctatgttctgccttgcagccctcctcttcctctttgcttccctgtgtgctcttaattcacctgaccgtgccacactgtccaattagtaggtcttaagagcggctccccagtccacctccaatatcctttactgtgaaattgagctggacctgtagcttcatggaaattgcaaatctctaagaaacaatccacagcctggctagatttgaggaacatttacggtatacaaatgtgggcatgtccagtacaacaggaatccagcagtaatatctaagtcctgtggttctggattcaaaggtttgtttaaactcagggagcttaaacaaacctttgtttaactaagtcagttatccccacttccctccaaacgcaattttcctgaactataaagccagccccttgctgacccctgtatctaaccaacttaactgacgactggagccattgcttattggaatgtttgctaccctgcattgctctggtgtatactgcagtatatagtaaacatttttgttcattgacatcttttccttattttcacagctgttcaagctattgcaaagtctgatttttaactggatgagaatcttttagtttggaggtatgcagtattagatctagatagaattggtaggcatttattacatagttcaactacttaatatttgaggtagttgaggtataagtagagaagagtatggaccttgttggacagcgccccaagtgtgttaactgcatcatctcacttctcacaagtcgaaatgagtttatcttttagagatcaaaaccttcaatctgagaataaagagtttactcagtagtccaactgggatttgaatcaagctctctttgacttagtagtttggattattcatagtcaaccactactagcttagcttatacacagctggtaggccttgggcaagccagtgacctctacccactcacccttacattcgtgactacagcctcgtaaaaggtcatcagcttactttggaaaataagcaggaaatcctgctagttcttataataaactgatggaagagtgaataatcttctgcagagctagccgttaagcacttcaaggagaaccatgacaacagaggcgccatctgttgttttaaaggtgaaaatccagggctacaatgggaaaccggtggccctgcctcaaggctgtcaccaaaaatgtgcttccagcacatcccacatatctctgagtaacgcaaattgaaataagaggaacttatttcaactgtccttggagctaggtgaaatgcagctagaactgctcggtgaggaggaggaataatgccaacatggtttgccacttgcaggtacagtgacaggagttccagtgccacttgacaatactcagggtagtggcaatgggtttccactgaaagaaagttttaggtgagaaaaatacgcccataacacctttgtgtttccttttcagcttttatgctctatccccatgtctccagagctctgactctgcctacatccttgatttccaatagagccacctcagtaaccaaaagaagtctcatggctgtcactccagtttcccagactttagtccagcactaaactgggtggatggatgaactgccatatctgctttccattgccactccatggtagtgtcccaagtacaataccaattgacattgaaattttaaattaccctataaaagttcataatatgtaacagcagttttatttttaagagagaaaaacggtaccatggtttcagaaaatggtgtataaattccttttaaaattgtctatcctccaatccagtcatttactttccaagagaaatgaaatctcaagtccatgaaaaagaatgcacaatgcctttgtatctgtaatagccaaaacctggaaatgtagccagtgttcaccaacaaagaaataagcaattatacatccataaaacgaagttctactcagcaatgggaaggagcaaaccaactacaggcttaagtggtaacatcactttaagaacacagaagctgacacggccgaatacatactttaggactcacttcatataactctagggaaggcaaaaccagtggccactgagaacagatgggagattggaaggctggaaaagaggaaagtggctgaaaggggtggataaaatgtgggagggttagtacatttgatgaggttcaccagactgaacatgtaaaaggtgcttcatgtgtgaattatttcttaaagagattcacaagacagatgtttccttttaaatttgctgtgtatgcgtcctcaaaatccttggggtgggtatcctcactttcttgcttcccaagctgattatgtagctctctaacaagtcttttaaaagaaccattatcccttctccaagtctgctgtctcccactttaaccctaattttcagagaagtcaagttttcaaaaggcaaagccaagcaatggtcattgcaaacgtaccaggcaactgttgtgctttgcctttggctcctgcaggtataacaaagataagagaggtctttggtagacgactattcacaggctgtgcctgcatgagctcctttgttacaggggtgggctgcacactggaaagaatgggaagagattccaggcagctcattgtcccagatcactaggccaaagagaaatctcccaaggctggcctaggtcttcaaacagaacaaactggaagaattgccacatgcttcccaggaggctttaggtggcttacgtttcccccaagaggatatgtggactgcaaagataacctgtttaattgctcaataaaggaattcaggttatccattgttaagtgatcactcaacaggcaatcgggcaaggtttctttattcggatacgccagccaagcacaggccaaagtgaggaggagggagccgggaccaggccaacagaagggaagggtccacgtgtccccgctcccttaaaaagccttttctacgtcaccttagacttccccttatcccgccctcacgggcatgttccggcacacctgtcctggttacctagggaggggctagagtgtctccctacaatccatggccattgaagtcataattttctaagagaaatgaagttagtggtatgatgctctcaaaaaacaacttcaatgaccccaaattgatggagtgttggcatatctgggctaatcctggggaaaggaagaaaatgaatgtatggtatataccaactatgtgccaggcagctaatctcccagggtttcaccaaggttccccttcaataatgatcaatacagtcaccaatagtggtggaatgaggtttgatgaggctgagacacttgcccaggcctgatgtacagctgggtctgtggacttgtgcctctgcactgaatctgatcagtgttttattgctctccaaatgtccacaagggatcaggggtatggctaggccctgagggtctatgtggtgatacattgtttatgatttattaaagtttgactgaggattcagaaaagcaaagtcagccacaagccttagaagtcaggcacacacctttaatcccaacagccagaccctaggagtcggtgatacacacctttaatcctaggactcagtattaagaggtagagggatctctgtgagtcggaggccacccagatctacacaatagagaatcagtctaaaagagaattatagttcacatctttaatcccaacattagggaagtatataagacagaagcaaggtctcagagaggcgttccttctccagccacactgaggagagtttacagtccgaggcttggtgagagctcctggagacaggatgagcccactcagcctgaggtagaggtgagaaactagtggctggctgctttgcttttctggtatttagctttaagcttgaacaccaatgttggtctctgggtcatttttgttttcatgttagaggtctacaatccaaccccagcagtttccagatgagctacaaagtaatgtctgattttctttgagttatcaaaagttttcatattattcaaggaattctataggaatttgtctctaagggaaaaatcagcctgtcatcagaaaaacattcaatatttgtagtattccaaagtacctggcaccttgggacttgggtgtgtgttgtgatccatttcttagtataccccatcctgaaacagtcatctctggcttcttgttttgtttggcagtgcagtttaaatccaccatgtgccagaattatttattgatctccacaccagccagtacctctgtgttctgagagtgtacttcaataattctaatcatttttttatgtgctttgtttgttgtgccatgactgttgacatttctggaatggcatttgattctgccttacacaggtctgttcacaggcagctggtcattcagtgctgacagatggaagccgggcctcagttcctccttctcccttcttccttaagatgggttgaggcggtgaaggtttgctccatcaaaatgatagtaaagaaactggcctggggtctgatctcccactggctatacatctcaataatatatagagtgttagtggaccagaaacacaagtgaggtggctgtgtgtggaggaggattcaaagactccatggatgagatctcagctcagcactgcttggctgggtgctggaggcagtcagtccgttggttctgggtaaacctttggttttccttgcactagcgggccagctgagtcatgttctactctcagcaatggcagaaacccaaatggaaaagggaaatacatggaccttcttaaatttcatgtgcagaaccaaccaaaactcccacctttacccttatccaatcagtgcaggcagtcccatggccaaatccaaagttaagaattagggaagcttacaagtaccgtgggaagaactgcaaatatatattgtaaaatggatagactgggggagggatgaaaacttatggctaataactcagtctcttgaagtcattgatttctgatttgcttgggtgcagaattagcaaaagaggaagttacatagctgcaatgtgacaggaaattagctgcattacaggttcattagtcgcctgatttcagactacttacggagtcctatttatgccctgactgactgctgctgataattcacaacttctgacattctccgacaagccaaacaatatcaatggccaatcataatttttaaacaagggataggaggagaaaaacatttcctattcttttttaaaaacttctgtatgtgcatgtgtgtacagacccaagtgtatgtgtatgagcatgtgaaccgagattagcaccgcccctgagtgtcattctccaggagctatcactttatttttgagatagggtctatctcagggacctgaagctcacatatttgagcaagctggctggccagcaaaccccagggaccctctcgtctgtttttgttttgttttgttttgtttttccttgctgggattataagcacaaaccatataaggcccagtttttcacatggcccctgggagttgaactcaggtcctcattcttacacagcaggcacttttctttccccagttcccaaatcatggtctcaatcctacacattacagttctctacaatgtgtcttagaaaagagaaagcattttccctggagaactacagcaaaatgcgagcactggtgtctctcgtgcctataaattactcatttgttatttaacacttcatgagtagaactaaaacatcattaatcttcaattagccagaaacacgtccctcacatctcaccacagtttctgtatcctgaaaagccattagtcatttctggggagaggcaggtatatcaccaggcagaaagctccctgcacaccaccaagtgcaggtctgtaattattctaaaaaggtgagctgcctgtggttttttgttttttgcttttttgttttgttttgttttgtttttttggtttttcgagacagggtttctctgtgtagctttggagcctatcctggcactcgctctggagaccaggctggcctcgaactcacagagatccacctgcctctgcctcccgagtgctgggattaaaggcatgcaccaccaacgcccagcagctgcctgtgtttttgattgttgttgttgatgacatgggcctcgtccaccacacttgggtcctcatcgtgtccccatccctatgttgccttctatctacttgatccttctcataatgccattcaccatttacttcagaatagtgcttcaaagatggagagggtatgcctgtgatttttacaggcaatgggaaggaagctggcacagaaatcggagtttttgagactcctgtaataaattgaaaatgcatatatattaataattaagttgaagagagacagagaaggagagcaaggaaagagataccttgatagagggagccattatggggttaatgagaaacctgacgctagggaaatgtccaggaatccacaagaatgacaccaactaagaatctaagcaatagtggagaggctaccttaaattcccttcccctataatgagattggtgaccaccttaaatgccattatagagccttcatccagtagctgatggaagcagaagcagagattcacagccaagcactgagtcgaactcctggaatccagttgtagagagggaggagtgatgaacaaaggggtcaagaccatgctggggaagcccacagaaacagctgacctaagcaagtgggagctcgaggacccccgtctgacagctggggaacctgcataagaccaaaccaggcctcctgaacgtgggtttcagttgaggggcttgataactctatggggcttctggtagtggagccagtatttatccctggtgcatgtttttgaagcccatttcctatggaggggggataccttgctcagcctagatataggtgagggtctctgtcctgccccaaatgatgtgacagactttgatgattccccctgagaggcctcaccctctctgaggagtggatgggggctgggatggggagatggtggggggaggtgggaggatgggagggagaggaaacttcgattggtatgtaaaataagatagtttttaatttaaatttaaaaatgaaaaaaaagaagaattaagaatacagacacacctctatacaatgaatagagagccccatgtccacacccagccctctgcttctgctgccagctggtctttatcctgtccatctggtgcactttgaccaagaatggcttcaaagtaaatgctagttaagtttgtctgcctttgcctttgccacaaagtctctggccaccaccaccacccttaccagtgttaacaccagagaaatgctctaaggtcccaagttatcggggtttcagatctccctgggaaaatgacctttaagctacacacagggaattgtgattgctttggcaattcacattttgtcaccagaaaaagaaagaaaaatcttccacgtcaagctaaattaacctcaagttcctccttgtaaatcatgcttttgagacagctgccattcaggtccatgcaactgcctaattctattctagctgtagtttgcctgacaacggatgccccatagccttgcataataaaggtaaaagttctctctgggtggatatttagtaactttcttctcttgtcattatattcagaatagggtttatttgttctgtgataattccatacatgtgtgcaatgtatcttgatcatatccaactccaactgcttcttcttccaatttctttaacaaccgcatcccacattcatatcctaaaaacaagtttctttgtatgcaagtctcattagtgcttcttgctgttgactggtctccccagcttcatggtgtacagataattcgccatggcatattcatgtgctgtccaaataagttgcagcactcccccattctctgactctggcactctttctgccacctcttcttagctgtcccctgagccttggagtgtgggaggtcgatatgaacatctcatttaaggctgaacactctggccagttaggagtctctacattcacagaaacggccttctttagacagggttgagagcaggacttccctgtgcacataagcataaatatttaggaggcagtttgacagcatgtctgttgagaaaccaacagtatcagggtcgtcgcctcctcccccaggcaccatgacttcctgaagcttttgaccgggtttacaggattatcttttttaaatcccatatgtcgctcatcaataaaaggcagcttgggccacttgtagatgactgaagtcatcgtggtgttcagacagaatttctaaatatggagaaaggtgattgcaaaacaattcattctgtgacaagcttgcatagacttcccccagacacgtgtttgattgttagtgctgattggaggcaggaagagcacaggtaattgaaaggctgttacctccacaaacgctattctagttgctgcggttttattgttgatggtgttgttattgtgtcagtttttctggcctgaatttagctcgaattgcgtttcgctgtgtaacttttcttattggctgggtttctggtaagaatggaccccagcatagacttttacgggagctttgagagagagagagtcaagatgagtgcagcaagtatgtggacttcagtccactcctgtggactccaactcaagcttgtgtatttcagctggttttcactgtctctactggacaactatctctcctcccaacattgagctccaggggccggtgactgcagcgccagccatggaaagaaacaacagcctttcagaaatgacttaaccagcaactaccctacaactgtacaaggtaaaaacccctgttaaagtccccgtgtctcgtaaagcaggataaccaggctacaatccacaaccccagagaagctaggcaaaacggaggaccctaagagagacacacatggagggcccccaggaaaggaaatagttaaggcctcctgggtaaactaagaaggggagtagagggaagggatgggaagatgagggcttgggatggcagagttgggagcaggacagggaagagtagcaatgaaagagatatcttgatagaaggagccattatggggttaggttgaaaccaggggctagggaaattcccaggaatccacccagctaagattccttgtaatagcggagagggtgcctgacctggtcttcccctgtgatcagattagtgactaccctaatcgtcatcatagaacctacatccggtaactgatggaagcagatactgtgatccacagccaagcactgggctgagctcctggagttcagctgaagagagggaggagggatcatatgagcaagggaggtcaagagcatgatgggggaaaccacagaaacagctgagcggaactagtgggagctcacggactctggactgacagctggggatcttgcatggaaccaaactaagccctctgaatgtgggtgatagttatgttggcttgatctgttgggggtggggtggcagtgggacaaagtcttatcctgggtgcatgaactggctttttggagcccgttccctcgggtgggatagcttgctcaacctggacatagggggaggggctaggtcctccctcaacttgctataccagactttattgactcaccaaggaagaccttacctgctctgaggaatgggtggggggaaggtgggaggaggtgaaggagggggaactggggctagtatataaaattaaaataaataataaagaaaaagtctttttctatctctgtcatcattatctgtctgcagcctgtgtcctctgcatctgcatctcgacctacatctctaccatctccagttctttctgtcattggtgtctctgtcacctctgcctccatatttatctcgtctctctgcctctgtcaccgtctctgcccctgtcacacctgtatctgtttctcccatttctttctgttcctgtctgcatctctaccacctgcgtctgtatttctgtcttctataaaatccctggcatttctgctcctctggcagacctgcactactgtggttgctttggtcaaatgctttccaatggaatgacagcagctttccaaacagagaaaggctggctgccctctttggggctaggggaagactttctttgatttctctattcacagactacgtttacacttggtcactgacaactgattctaagtagtttggtgatgatagaccttgatgtagctttcttttaatttctgctgtttggggatttagaacttaggtctaggaggtgataatttgtatcagctttggaaagcttttgataatggcttcttcaaatattttttcccattattcctactcgattatcattctaggagtacacttagatggatcttaacttccttaactttgcccggaggctacattcatttttaagtgtttcccctttgtacttattcttaaagatcgtttttattatagtcattatgctgactaatctttccttctcaagggcctatctgccattaatctctctaacgtctttcatcttagattttacagttttgatcttaagcagtttgatcaatgtctttttaaaaataacttttttatgggttggtgagactgctcagtgtgtaaaggcacctgccataagcctgccagcctgagtttgacctttgtgacccacagggtgggagaaggtcaaataccacgcattgccctctgactgtgcgtgtggctcctatagataaatacggaaagaactcttaatacttttcatggctgcttaatatgcttcatctttttactttcttgagtaaatgggccatagtatttataactggcctgatggccatcatctactaattctactctataccatttctaggtttgtttctattaagtagtttactatgtttactgtgggtcatactttactgcttcttggcatgtctaataattttgactagataccaaacattttttttatcctgagtgatgaacaactatgtatttctaaaacattcttgagctttagtcttaaacaattcttttcaggctagcattcattacatgggattacagcagtctttagtttctagttattttgcctctacatcgattaaaacctttctattgatatacacaatccatgaattatgatgttttctttttaccctatctggtatttcagtttggctctctcttccctgtacatgttgtgaacattagctgcttgggatttactagaccttaacttagatctcctctccaggccaagtctggaaactccttctggagaataaatgacgacatataactctaggatgcaacttgtatgaaccctctcagacaaggcatcccctccctgtgattttttttatgtacgaataaaagctattgcttcatatgctacatcggctgttcttctgctacttgggaatgataagtctgtccctcttactgcatcttggtgaaagtagaaatcataggcaaattattttagggatgaggttttcatgataaatctgcttaatctgaaagtatctttagtgggagtcaactactaaaacatgaaacaaaatgcaccaaaagcctgataccaaataaagtcacctacatatataagctataatcttttgatacttttcacacatacacacacaaaaacaaaacatgtaaaaaaaaccaatggtatccctgcttgaaaagtttgttttttagttattttcattaattattgtcactataaatcaatattggatgacaaataacaagatcctgttttgaattgctgtaacagaaaagtgttacatttttctataacaatccctttaaaaacatgctctgatgtttacagaaaaatttaaagtaactgttttaggttttataacaaaaactatgttttaggggctgccacagatgatagtggtgaagtggttgagggctagaaactgaagtatgactaatgatcaaagcgacatcatcttcaaagtgacaaacagccttaagttctaatgctgttattctagaataagctcatttcaaaagtagctctgtgggcatggggagatagctcagtggttaaaatcacttgctgctcttcgagaggacctgagtttggttcctagtactcaaggcagttcacaaacacctgcaactctagcttcaggggcaccttctgccctcttctggacttaaaaggcactacactcaaatgcacatacacacatgtacatataaataaaaataaatcttttaaaaagagtagtactttataggttctggattcaaatctctttgtgtccctcatctcatactggcatttcccaaactgtgtttcagaacacactttcaggaaatgctaacatggactttgtggataaaggaatctcagggaataaataagtttggggcaaatactgaaaagacctgtatacagtggtctattttcagatatgtataatgtatggccatgttaaatatatgacacaccctgctttggtttgtttaaaccaacattttattaaatactacacatcttgagggaaatgtgttatttgagaaatcaatttggcaaactctgcagtcttgtgattataaggatcatgtcatgggctggactctttacatattaaatgtttctatttggtggttattttaaagctctgttatgtaaaatatagtcaccagccaggtgcagctatttaaatttcaattaagataaaaaaaaaaagagttcaattcttcagttacacaagctgtattttaagtgtttcatgaaagtcttctaggcttatatttttgctttgaggagttcatactaaatatatcaataatgccagtcttcctatatttctaaaacacacaaagcaatgcttctccagagttcccaatcaccactggaaacattaatttattaatcttcataaaagctttgagaagtagaaagataatgcctccctgcagggaagcctgcgggtgtttccatttaaaggaaacttgggtggtcggctttaacagaattactccattagtaatttgctgaagtcccctgtggtcacctgcaagggctacaagcagatgttatgagcattcacagctgcaacctgaagcctcgctgacatttcatgataggaggtgaacgagccacacagacacaggcatacacagtctgtggcatgtgcccctgacctcaggtgcagctggaacctggagttcttctctcaagaccaaacacctatttcagccagtgtagcaggaaccgaacttactctaatggctggagagatgacttagtgggtgacaggtcatactgtgcagacgtgaggaccagagtttaaatcctagtacccacagaaaacattaagtaagcatagctgtgtgtgtctgtaatcacaaataccgggagtggagacaaatgatgggcctctggttcagtgggaggttctggttttaaaggaccaggtgacagttacagaagacacctgacatcctcctctggcctctgtgtgcctgtgtgtgaacatgcccacggacacactcacgggcatgcaccacacagacttcccacacacatatttttaaatggatgctttagatgcatggctagatgtcaaaggggaagcacagctcctcacatctttatgacggacccaatgtaacacaggagccccagttgcaggaggacatgggaacaaccctaagcttgctactaagcagaaatctctccccttttagatgactgtttagctaacactaacttctgtattcctcagtagtccttctctgggacagtgctgggaggcaacacggagggaacaggctctaccccaggagagtctctgtagggaattagattgagtgaacagcactacagggcatctgcttacatttgaatttcagacgagtggcaacttttgtcctaaggttgggcactgactttgtctgctttactgtagcttttcccttgtcttcttcctatctcgtttctcagtatgctttccttaacactttggcttcccctctggcaacatattgagcttcctctctgtttctcggagcctcctccccaccatgtgtctgcttgttagtcacgtgtctaaccgctacgaccactcaaacgacatggctttttccctcctattccccaggcagctgctgaagttgatagtgtgatggctctggagttttgcttttaaaatctaatataagaaaatgggttgggatctggccagtgtcagccatcatcagagaagctttttcttttggtaggtgggaattagcacagaagcccacagctggacaatatgaagagagtgagaaacatcggagtactcaatcctaaaataggatgttttcttcaaatccttccctcgggtctcaggaaactatttggaagaaggggcagaaagactgcagagttgatgggtgaccccatagaaacagtgtcctgcagacacaataggactgatgcacgtgtgaattcacagaggctgtggcagcatgaacatagactgcacaacttcaagccagacagctcccagcactgagaatggggaagtggacatgggttccactcctactcaagaaaatctgtaattggtacctacttgtaaagggaaaattagtcttctccaatgagtttcactgtatgtattaaccacacttcagagcaagccttatgcccaaaggtagatagccaacacaaaatgagctcaatggtatttttgtagagttttgtctcatatagttttgtttgagcatttcttagtctcactggtcttttgctgacatattttggtttcttgtcttgtgtttctgtgggatgtgtaagtttcttggtttattcatttttttagagagaaaaagaatgtggagttggatgggtagggcagtagggagaatttgggaggagttggaaaaaggtgatcagaatatattgtatgaaacaatttttaattaaaaactttaataattttttcttgagttttcagttgagttcattcttaaattcctttattaataaggctaagaacctacagaaggggacatctgttctccctataacatgaagtcagataaagattccaatctgacttagtagatgagtgattaatttttttctcaggaaggctttggtgtagaaattgtgaaaacatcatgaattttagaatcaagtatgtttgggcttgaatactggcctttcttgtaccagccatgtggttttggagaagttgtgtgattttcaagccttgctgaacttaataaatctaatttaggtgggggaagggataaagtagtcatgattattactattgtcaacttgacatgatctagaatcacctaagagacaagttgcttagcacgcccatgagaagccatgtagattaggctaatggaggaggaaggacccatcctgaacatgggtggcgtcattccctgggctggtgtcccagactgaatcaaaaggagaaagggaactggatgattgcaggtacttgttaccccctgcttcttgcccatgggtagaaatacaccaaccaatggcagttagggactacaaatcaaaacctcccaaggttttacagttcataggccaaaaacataagccagaaccaaagtgcaccaaacacacaaagagaaggtaggggttagaggaataaggtcagtcttctcattttgtaagaatcccaggctctgctttccaagttgtccagatcactcaggtggcacgaaggagcctgacacagaggaaaggcatgggtgtagatcccgggttgggtacagctggattaactcacactgtgtcggggcaggttggtacaggtccactggtgatggtcattccctaagttggttgttcatgtgtcatgaccttctgggggcagttttccttatttttggacttgtattttccaagtctcagtctctagacttcctgtcaatcccatgaactactaaatgttctcttaataaattctttgtacctactatttgtatcagaaagcaccaatattttaatattaagcagaacccatattttaaagaggtcagttaggttggtgagatggttcagtacttatcactaagcctgacaacccatacttaggacccacatggggaaggcgagaaaggattcctgcagattgtccccagacctccacacatgtgtggtaatacatgaacacacacacacacacacacacacacacacacacacacacacacacactcacacccctctacatacctctagagaaggtcaacatattttaattagttttatttgctagctctagtatttctttgaactaaaatgatcttcttaggtaattgcacactctttcatgaaaacacggtgctgtcaagaacagtagtcttaactgaaattaattgtcatctcctgggaaattctgaggccaaaacgaagagtggcagacatttttcatgggctagcattacctctctgcaaagcttaacctgttagacccccggaaaactcaggtatccggggtcccaggccacgaccgcgatcaccccaatcaccaggcagattcaagagcttgctgcaaactgcatgaggctttattgtaatttaacgagctaaccccatgttagcttgggtcttttgtagccaccggccatggcagatggctacaaaagacagctcctaggggctcccgagagatcttgtagggcagcgtaaggggagtgtccaggggtgcacacaggctcacaattggtgtgcctccaggcttggagggctttccctgtgttgattggccaactggttgttatggcccatcggccctcccagggtggttgctatgctctgcttgtcattgctgtgcacttgtccataaagcacacccagggtcgtaaggcataacgccaccagctaacttctaattggttccttgtcacgaggcaggcgtctgacctctaagtgaccaagacaaagttatggcaagcatgtgttactgtcatggctgccgaaatggggggctggtcccttcaaacctaatagctctccaaattaatgctctgagagagatcagccttcccagcctacttggttaatccaattcctctcccactctccctgcctcctggtcagttgaagatgctctgactatttctcatttgtccattcctgaggagacccacattcccattgaaagatggaatcctggcctctttggatgttcctgacattctgggagccccacatttgttcaggtttctatcctgccccccggcttccactatgcccactgatggcccgtggtgctgaaggaaccagcttccttttggcagccataacagccgaacacgtgcttgccataaacctgccttggtcacgtagaggtcagatgcctgtctcgtgacaaggaacccattagaagttagtcactagaaagtcagatgcctgtctcgtgacaaggagccaatcggaagttagctggtggcgctatgctttacgaccctgggtgtgctttacggacaagcgcacagcaatgacgtagagagcatagcaaccaccctgggagggcctatgggccataacaaccagttgaccaatcaacacagggcaagccctccaagcctggaagcacaccaatcctgagcctgtgcgtacccctagacactccccttacgctgccctataagatctttggggagaccttaggagccgtcttttctagctgtccgccatggcggatgggtgaaagacccgagctaacatagggttagctcgttaaattacaataaagcctcatgcagtttgcatcaagttttcgcctccattctgtgtttggggtggccgccgtcctggactaagattctggaagcctcagctttctgagggtcttacagtgcctgcacttaagctcaatgtcctgatcttctgttgcactgtccctggggtctactacttcctgcccatcaatcatattgacagctagtctaagaaatagttttatttttttccttagagtttaaatccagagcaagtatggtgggcttttatcctctccttcatgaatctacttagtagaaaatgcataaaattgagaaggttggagggaagaggagagcacctcataagccaccattttcacaatgatttgccttctaatcatggctgtgtgaccatagacagcactgccatttatttagtaattgctctgggccacacattctataaagtctaagcatgggtcatgtaatatactttaattctcttactgattcaatgaaataaatatttccattttacaaaggtggaaacagaaacacggaacagtggaaaaaactggcccatttcataaaaggtgaaagtattcctttgggattgttgctcccaagcatcctcatgctgatcccaaagttactggatcatataacaagtactataacaggaatggactgtcgggagcgatttccaggggttccagtaactaggagatctggtctgcattgaatagacaatttgctattgtatagcatggcctcagtggggaatgtctcctagtttgcacctctacagaaccaagcatttgaataggcctgcacctgggcagaagggcaaggtgtgtaagtaacaagtgaggacagagagttaagagccaaggagcagagaggggtcaggaggagagaaatggcctcctcatggccatagaagcatggttaagaaacagccgagaagatgctaaataaacaagagactctagttttacagcatggaactgagagctctctaaagatgacaagatgcctgcctggtcttttggtctttatcgccgttgggttgctaggagctttcaagttcatgctctcccactcaggccaaacttcatggctgctgtggcttggagccgagaccagccagggcatgacattggaccaaagaacctttggaacattgaatatcttctcccaaagatgcctacttcctggaggttaatatatggagtcacagttgtccaaaatgtaaagagtaagtaagtgcctgtggagtcctcagctataaatgaggcctgtgtatcacacctccttccttcaagctgggcattggtggcacatgcctttaatcctagcacttgggaggcagaggcaggcagatctctatgagttcaaccagcctggtctacaaagctagttccaggataacctccaaagctacacagagaaaccctgtctcaaaaaacaaaaaacaaaaaacaaacaaacaaaaacacaaacacttccttcaacacttagggagcaaggagggatgaaggaagactttaagatctacagttttgggagtgttggggcaaaacactgtcttttagatatgctagggccacttcactcacaaactcatagcagctatggttgtctatacaagacttgcacaaagccggacgttggtggtgcacacctttaatcccagcactggggaggcagaggcaggtggatctctgtgagttcgaggccagcctggtctccagagcaagtgccaggataggctccaaagctacacagagaaactctgtctcaaaaaaccaaaaccaaaaccaaaccaaaccaaaacaaaacaaaagacttgcacaagatcaaaccagtcaacattccagcatcactgaaggaatggtatacaagcccccacccatacttaaggagctattgagagttaatgggtacaataggagagaacatcagttttatttaggaatgaagacataggttgaccatgtcctaagccatcactggacttagtggataattatatatatatatatatatatatatatatatatatatatatatatatctgcatagttggtgggtggtgttccagagagttaggcacaggatgaatataatttaaatacattatattcatatatgaaattctcaaaaagatcaataaaatatattaaaaatagaatgcctgctttctcatctccagatcaacatgctaggttacctatagaatgagtattgaggttatagatgaaactaggtttgctgatctgcggatcttaaaatgtggagattgtcttgggttttctaggtgaacagaatgcaatcacaatggtattttttgcagttcagacacagatgtgaagatgctactttgctggctttgaagatgaaggaagggagacacaactaagggatgcaggtagcctcggtaagctgagaatggcaggaaacagattgtcccctccagcctcccaaaagagcacagcctgataaaatgtgattttagccaagcaactcaatgtggacttgtgacttgcagtaatatgagagggctcatgtctgtctgtctgtctgtctgtctgtctgtctatctatctatctatctatctatctatctatctatctatctatctatctatctatctatctctcggtttcatgtagcccaggctagctagccttaaactccctatataagccaaaatggaagcaatggctatgaatggctgatctttctgtatttacttcacagctatacatactgtttaaaatcacaaaacttctacagctttgttatagttatgggagaaacctagcacaagacccctgtcctgggagatatttggggaagaaggcaagccagaagctacctgggttgtatctgggtgggatggatggggatctattgggaacaagctggaaatgggtctcctctgccatgctaaacacattttccctggaaatagtaatctgaatgatgacaattaaattttattagggctttttctttgctaggattcctaattttttgtggtgaaaaaacatgaccaaagcaagttgaggagaaaagggtttatttggcttatacttctacatcactgttgatcatcaaaggaagtcaggacaggaactcaaacaagccaggaacctggaggcaggagccgatgcagagaccatggaggggtgctgtttactggcttgctcaacctgctttcttatagaacccaggactaccaacccagggatgacaccacccacaatgagttgggccttcctccatcgatcactaattaaggaaatgttctatagacttgctcacagcccagtcttatggagaaattttctcaattgaggctccttacttttagatgactctagtttgtgtcaagttgacataaaactggtcagaactctttatgtacattttaatgcttattgtacttatttaagatatgcaacatgccattttggtgtacatataaacaatgaaattattggtttagttggggaaattgacatatcatctccctctgtactgtgtgtgtgtgtgtgtgtgtgtgtgtgtgtgtgtgtgtgtgtgtgtgtgttgtccacttgcaggcatgcatgtacatatgagagcctcatgaaatctcttctctcagcatgtattcagtatacagtgcaacattttcatctacagtcctgctagggtaaattaaaatgtagacaaaacctgaagaatccttgagcatagaaagccagttaggcctcacaaatgaccttaatcttgtgtgatttacagacatgaataaaagtgaacttgggatacttcttatagaagcctctcttaaagaaatatgaaactccagactaaccaatcaaaagctaccaactaacttagagtagaggcacttcctatttctctacttacagaggaggcccaactcaaataagataactgtaccatcacacccattgtgatggctgttgatgctccagcctgaacagaaaagagaaggccaatggagaaaagagaacttctccaagacccagaaggcagaggagataccaggctggagtcctggcagtgcctatatggtgaaggagacttctggaaatcccccacacaacttctgctttttggtttagtcagaactagtttatatgacttcacctgactaaaggagaaattagtcatttgttttattgtcaactacaatcagaacccatctgtcagtaagaaacaggagagactggttattaggaggcaatgatgtagtcacctaaagaggatatttagccctagagggaagttctcttattgacctctctatacttacccatacccaaggctcctgctaagtacatagatgttcatttaatcaccttaaaggtgggcatggcgcctcatgccaaattgcagcactcaggactctgagtcaagattgttgaatttgaagccagcctgggctagagtgtaagagcctgtactgaaacatccacagacagccaggcatttaagtgactttcttaaatggtataaatcagatcaataaccaatactggaacacagtgtctattatagaaacactttttgatttggtgtggaacactgtggattgagcctagagcctcacacatgctagacaaatgttctactgctgagccacaccactcttagcctttggcattctttgtgtgtgtgtgtgtgtgtgtgtgtgtgtgtgtgtgtgtgtgtgtgtgtgttatgtacaacaatgaacagccttctcaatttattcaaaataagtttgcttattagattttttttaggtaaacactaagctttgttcctaaggtgtttccatggttaccaaagatacctcattttcctcaatccagaagtggctgtgaaatgattataacccagaattatcttaagagttaaacaaaatattttaagaattaaacacagcatgtaacatgtgcttagcaagaagacatttgtacaaagcagcaattgtcagttttctaacaataatcttactctttttataaattggaaaatgaaaatagtagagtgttctgatgtccagtgtgatattgtgacttacacatacattgggaagtgaccacatttagcaattatctcatgtatgtatgaacatacttactttttgtgtttgtgagaacatttataatccattctcttggtggtttttgtaactactcttgtcatggtaaagtacagccaatcttttgaacttacttcccgtgcctgtctgggattttgtgacctttgacccatatccccaaagcctcccacctttcagatgcactaagtattcagatcatattgatctgcctctaggatggtgatgatttgttgaaggaacgtctgtccttgtaagaatataatggtattaaaaggtgaataaattctttgcttctgtgaatactttgaggtatcatttgttaagtggttgactacactgataaaaaaaaagttatacaatggaactgtactgttgtctcaaaaatggtttccatttatcttcagctggatttcatgtataaattgagaggtagactcagagacctgggactccaaatgtgactgtgtcagttagactcaactgtcaacttgacactgtctaaagatacctgagaaggaagtctcagttgagttgttagccaaatcagattgctccattagcacatctttgggggattgtcttgcttgatgactgatgtagaaggcccactctgggaagtaccactccttgggccgatcattgagcagcataaagtttgttaagcatgagcctgagagccagccggcagcattcttctatggtttctgcctgaagtgcctgtgtgagttcctgccttgacttcctgcaacgacagcctgtgacctgtaaactgaaattcatcctttccttccttgtgttgctgtagtcagagtttttcatggcagcaacagacatgaaactagaacagtgactcagtgtcccttagagcttcctttcatgtctaatgacacattagcaactggagaaagtctgtcccattatccataagtaaaaaggtgctttctgcatttgtttccaagatgagtcacaggtgggtgtcactggactcaaggtccaggttttccaaagtcttggttctccatggctatgtgtgtcatcttggaattttggaggtggtgtgaatctaccaaacgcgctcctttctgtatctctatgccatcgtagttaaaatgagatcaagccttcggaagtagaacaataggaatgcagcaatagaattgctactctcagtattgcccctgcttgggatttaaccttactggaaaagaacttcacaactaaaagtacctcttcaatgaaaatggagagcaaacatttgtaaatatgcttcaagctctgtgcagtgtttgtgtatattaacctcacaccctcagagatgtaatagagaacgtgcttagccttgcagtgtcaaggctactgtacaattctaatagcatgatgtcacaaaactgctttgatgtcagtaaaataatacatagtacggtgcagaataaaatttgtctgaagtgtttgtccctgggagatcacttcttaaaacttgcaaaaactggggctggagagatggctcagcggttaagagcactaactgctcttccagaggtcctgagttcaattcccagcaaccacatggtggctcacaaccatcttgaatgagatctggtgccctctgctggcatgcaggcagaagactatatacataataaataaacaaataaataaataaataaataaataaaatctttaaaaaaaacttgcaaaaactgtatgtaaataaaggagtctatgaggaagaaaacctaatttttcaaagaggaggaaatttaggggatttttaaacaaggaaaaagcaaaatgagtctaaaatccaattaaagtaaaatatacaaacaaaagaacttacgttgtttggtcaagattggtttcttgcctgggtcttgggacataagtgatccattgactttacctcttgtgaaaggaatttagattctactcccagtaaacaagcagacatatgtaggaaagaaagaactgttcagaggaggagacaaatgcaaaagaaagagaggaataggaatcctaaacaccataaaaggttattttctctaagattggagaacgttgtccccttcccatcatgcacttctccaccagggtgtttgcatgctgggtagcaaagggcggatggcattgctgatacacagagatttgtaaaaagtagatgcaccttttcttagatgtactgtttgcatttttgtaatgatgaggatggaacctgttagccagggccacaccatttagtaactctcctgtttgaaacactaacagttaactgtaattataataagtttattaccagaactaaagtgatttgtttttctagattcttctatcctccattgctccctagtaaatagcaggcccgagaaggtgttcactgatcttatagtatatattcttagagaaaaccgaatcttcctctctcagcacctgagaattgtcagtattctcatctgtgggcagaacttcataccaactccctctctgtactggggtttgttcaggattgagtttgcataggtcatgtcacacttctgtgagttcatatgtacagtagccctcctgtgcccagaagacaccattcccttgtagctctccactgcctttagcttttatgctctttctgccccttcttcctcagtgtcccctaagtctttggggttgttgttgttggtatatatgttctgttgaggactgtacattctctgataccttattctcttcaccttggccatttgtggatttctgtgttgagcatcatctacctgtaaacatagccttgctgatggggctttgaagatgatttaatccatgggtataatggtatgttactaggaactggcttaatactaggtctatttagcagaataatagtggtaagttctatcccagagtctataatctatctagtcatcaattcttagcctcataatggtgatggatattgcttttatcttgtggagaagaccttaagttcaggtaggaagtggttgattgttcccacactgttcatgccactattgcaccagcaagcaatgtcttgccaggccagtgattactgtagctcacagagttcacagttgggtaatactgatgatcacttttcttcttcagtaacacacatatcaccttccaggactatgaaccagtaggaatggtagctttgaatatttcgatgtttcatatgtaatacccatagaggccaggacattactaaggggcattcatagtaagggagataaaatacactggtctaaatggaacttatggagcagaaagggataaatttgggtgatggaagagagggtagaggaaggatactggaagagttaaataatactagtcttgacaaagaaggtatatagaaattatggctgttgacccttttagaactatatctatgtacatacatacataaaagaattaaaatacatcgatctcttgattaaaatgcattgatcacattgatcttatagcattgatctctgacctccacatacacatgcgcacacaccactcacacagagaagcgtaggcacacaatacatgcgcgcgcgcgcgcgcgcgcacacacacacacacacacacacacacacacacacacacacacgcacgcacacacacacaagtgctcatcagaaaatacttaattttgttaaaaagctgtgcttttgtaaaaaggggggagaaagaaaaggaaagaaagaaagaaagaaagaagggaacagaaaagaaaagacgagaaaagaaaagaaaagaaaagaaaagaaatagtaagtcaaagaagacaatagaaggcagctcagcttctactagtaaaaggcaactgtgacatctctgggtatggatatttcctctgtctctgcagactgtacacagagcaccaagcccagtttcagggactctttccctgggtaaatgaacggcagtctaggttatcaacatactttttcctgaaaatcgttagaacgtagcctttgcttttcaatctggggacacaggccactgtcctgactgtggacaagatggtcccactcatcactattgctgaggttcaacatgaggcctaaagttgaatgaagaactccttcatttcgagtcacattttgtcattttgagaggatttagaagcattataaaccttgggatatttgatagaagtagtttacctcactgagaaggttgttgattggttgttagtcatcttactgatgacaaaatacctgaagtaattaactcctcaggaggaaagctatttatgtcattatttttatacatatgtggtggtgctggggggggtacatgtatgtgtgcttgcgggtgtgtcatggcaatgcacgagaaggtgaaagaacaactctccctccatctcaggtgctcaggcaggattttgcggcagcacgtcaatccatggggccatcttactgattcaaaagaattatttttaagtcacaatctgaagattttatttggttcatggttacttattcctggtgctttgggtctatggcagcatgatgatagacgcatgtaaaaaagcatgttcatctcctgaagcaaagagatggggtggggctcaactgtcaatttccatgacaagtgctcactctccagagatctcacttcctctccttaggcccctcctctaaaaggctctaccacatttgagcaccacagaataggggctcaatcttcaacacacaggtctttgtcgatatttaagatcaaaacaacagcatgggacagttaatggtttcatgctcatgtggccattacagagaaaataaattaggaaatacagactttgcagtcctacattcacggactgacaatttggctaatcatctaagggggtcttggtttggctctggcatagggatgctgggtcagagttttagagcccttaggaaaatcctctgctctctagccttaacgttctgcccaattcaggcattgccactgcagcagccccagcagcaggtggcagtcttgcccatgacagaattctctaggttccaggagatcactgtttctacctcattccatgtcgaagatagttagttttagaaataaggatcttactaatcacattgaaatgaattcttctccctagtaattctcttgcaaattctgtgtctgttttctggaccacttcaattcaggctttatacttttcttatccaactctgttcttcccaacattaagctcattagcttttgcagtggttggcagatcaactggctctttctatcagcctaaattcccttccctgtgaggcattcagacagaagatgacatcctaaagtgttctttgtggagagcctccacaggactgattcccgacaaacatgatgcagaacttggggttgaggatactgctcagtaggagagcactgacctgacattcacaaagccctgggttctatcccagggtctaaacaagtaaagtatatatgaagagtgcatgagcatatcctgatttgggttttctgttggggtgcttgtccatctaatggattctctacctttgtcctctgtgcaggacattgtttgctcactctctgtttccatagagttctcaaattggctcatatcaatcaggataaaaatagcagggacaccagagtggggtactaagtcaaaattagcctcctccagagtcctacatcatttgttatctgtgtaggacgctggaggaggctaatattgacttagcaccccactcaggtatccctgctgtttttatcctggttgatatgagccaatttgagaactctatggaaacagagagtgaacagacagacagacagacagatagacagacagacagacagacagacagagacacacagaaacagagacacagataaagagataacaggtagagacagagaggagagagaccaagaagataccccacaaagccaaatcctagtacctattgcttgttagttccctacctctgtaatagacctttattcaagtcctcctagttaactcttggagaatgcaacctcttcctctgtcacctggtaggcacagacaacacacagacataagatcattgaaccacttgaaccgcacaagagcaggtctcctcgagtctgcatgtgtaaaacctacttgtcttaagctcccaaatacatgatttttgaacttggcccccagagaggtatttaagttggtgatgaggacttgtgactcttgtttgtatagttacctcagtctttcttctcaaggacttgccagcagtgtgcaggttttgtgactgtgcgatctctatctctatccatggagaggcagtataacatcatgaggaaagctgaactttgaagcagagaactcagaatcacaagccttgcaacactgaaaagggaaactaaactcaatgagcttcaacttctttatacacagagagtatctgaaagacttggtgcacttagcgaatatgcctgccaatctctcatgttccatttggcccacagtagggattcaataagtggtggtttcttacacagaagtggaattataactatttcaaaaagacataatgggaataaagatccctcctgagctggtcacctgagaactggagaagcatgaaccacctacaaatggtggacagacagtaaacaggagaattgtttgctcaggcttccagaaaggagaaaataatcttactggcaactgcaaaacatttgaaaagatatgaatgggacctttctttgatctcctgattatctcactgcatctttagctctcctgctgacttcattcattgagctctctctgattcccttctctacttccaacacctcaacacacacacacacacacacacacacacacacacacacacacacacacacacacacgcacaaagacagagagtcagagagacagagacagagagagacacacagagagaaacacacacagaaagcatgctcatttggagtgagctctctctctttctctcctctttgccaaggcatccttttgatgtatggattagtcctatttgtttcccaatccattagttcctgcttccatatttatcactataccactgccactctcctcagagtagttaatcttttattagttttttttttgttcaaaacaataatttattttcattctgctgtggttgtttttcataagtcttttttattgtccctgttctctaaacattctgcaaattttgtttatgtttctttttgataaaataattatttaagagggaacttaaaatgtccatgatgtaatttctaacttcactgcattgcaatcagagactatcatcagtacacattattgttgtttaagctttgtatggggtctagggaggcctagaactctctgctttgcctagggtggcctcaatttccaaaccacccagcttgtaagtgttcaccaccacatatagatataggaaacattttttatatgtttgaatttgtttaaaaattcagtgttttccttttctggttgcaggcactggtgcataattatgagtctatgaattgagacatcccatagagtttggttaccttattgctatgccacaaaattagagggtaaattaaatcttattttatcacagttttcttcgtgtagcttcttgcattccaatgtgtcaccctcatgaaatgttttataaataactgtgaacatattgttcatgcatggcatcaaggttttctcttttgtagagaactttcatctcccccttgagcctgatctgtcatggtgttaaacacgaggtttaaaatatcagtgagaatttgacttggattccagggaatcgcaatagtaattcaggaccacggacagctcccacactgcaggatgccgctagattatccaactttcatgtcttagctctagggcccaaaattagaacagaggcatggagaatcacctacaaaaaggagaattggcttctggttttatgcaagacttaatcaacagtaaatggaccttttgagatacgtgatttaattgtgaactgtcccacatagtctcacctgttggaagacttggtctacagctgatggctctatttgggaaggttatagaatattaaagatgtgtaactttgttggataaaatgagttactgggagtgagccttgaagttttataccctggccacacttgctatctcctctctgcttcctgagaatggtacactgttacctttcagcccttgctcctgccttcaagccttccttgactactgcattgctatctttgccatggtagactgtgtccctctggaaccttcagataaagtaaaccttttataggctagttgcttttgtcagtgtgtcttaccatagcaaagagaaaataatcaagacacagaaccaggaactgtccaaagcagagtattcattgtatgtcttcaatgttactgatccactggacaagataatcttatgacaaggggtacctcatgctattttggctgaagtacatttttacaaaagtatccaattagaatgtgagggcaatctggctgcaacattgatcccagggttgattcagttgatcaagttggctagaccggtgtccctttcctgtctcccgaggctgtttgatcagtagtagatgaccttccttccctgataggaagactagtctttggtcaagggtatctatatctgcactgcccttctagaacctccacacaagtctcaaatttgtgcatcatctctcattgtgggtctttattcacaaaacatgattctaactcagcattcctttaagtccctctgcgtgagaggatgtgtttggcaccactagacagttcagttccttcctgtgactatgaaaagtcccagtacaacttggtaactcattctctagttgtatacagttagtgtgacgatgactccatctccagaaccccccatcctctctcagtgtcaatacatcagtctttgcttatgttaggttgaaagttagaactttaagcttcacagctttgctcagataccacctatgtggccatcttccaatgagctgtatcctgagtgctctaatgccctactgttcttcccataaaagcctgacaagagagctagtgtgccctgtgatgatcaacccaaatcccttctcctagttcacaagttcccacaggctggctagccaactcatagtcatgacacaatgtaacatttactgggtacctggcaggatagaagaatggcattcaaatgtctgcttaatttctgggagaaaattttggttaaaggtaattatcttttaacacatgtttgtgtttgacaagagagagggaatgcttaatttatgaatatgggcatttgttttctcaaattataacagtctggctgagtattggctgttattattcagatttagcatagaataagcattgggctaaatgacagtgggcatcccaggatggctataaaacatccagaaggctaccaaaggtcttgacagtagctcttgtttcttctcataaaagcttgagaacatgttttccactgtaatagcataataaactctctctgtgtctgtctgtctgtctgtctgtctgtctgtctgtctctctctctcatacacacacacacacacacacacacacacacacacacacacacacacaaatttatatttatcagttaaaatgtatccactaaggaacactagtgcctttcttctatctgatcaaggaaactcgactttctttaaggtaattccttctatattcaccccctcaaactatccctaatttttgtgaagaccctttctttatgaagtcaaatggtcccagtagttaattagccaatactagttttaaaaacccacacagcagaagtgaaggaagacaaatgtcacattttatgaagtccttcactgggtactaagcctgccatttcctaagagtgactgtgttttatttctttgctgggtttagtcccctgacagtgggcagggtaattcaggtgtccatgtagccttcagaaagtgcctgtggattttttcaggtctctgtgtaaagatgattttttaaaaagccatgaaatgagtcagcagcaatagcagaaggagaagagtgaggtctctgtaagagaccatctggcacatggagttctgagggaaatccctggctacagaagcacagggtttgccttggttttattagaatggggtggtgggggactagaaacacagaaaataaaatttatattacgtcttgtctagaatctgaggaccacctacatatgcacatgcgcacgcccgcgtgcacacacacaaacacacacagagacagacagacagagagagagagagaggagagagaaagagagagagagagttcatagggctctacccctcacaaatgttttcaatcatgggtcaattagttaaatcaacaatacatctatcaggaatgtcaattgggtcccatttcttagctatgtacctcttgccgtgttatgttctgtgccatctggggacatggcggaatccccaccaggtagaagaccctcacctgatggcacttgtgaaaacaaacctatccatgattcagacacaacaacagaagatggactaatacactggaatgaagtttactccaaagatggcactggcgttttatattgcttgtcctgtgaggtggaaggtcctggggtgggcattcttattccttataccccccaacacacactctctcacacacacactcattcacacacacacacacactctcacaagtcactcacacacactctcacaagtcactcacacacactctctcaacacacacactcacacatgctcacaactcacacacactcacacactcacacacttacacactcactctcacaactcacactcacaacttactcacacacactcactggcaaacacacactcactggcacacacacacccacacccacacacacacacacacagagcacaatccatacaactttaattgtatttgcaagcagttttgcttctaccagggattagcttacccatctgttttctcattacagaaacaaaatgaaaaatgaaacaaaaccaatttccctccacttaccctcctagaacctttacctgttacactaatgttgaaagcaatgaatcgaaacataaacggaacatgagtttgtttcatcctcgcatctataatttgaggttcatctcttttttttaagaaaaatatgattttcattttatgcatgtgagtgttgcttctgtgtacacgagtgcaggcccctggctcacatcctgattgtcgcagtgtgagtgtaaatagacaactttggcaagagccaactcctgccatgttgtcgagacccagcatgtctcagccttagtccatgaggtgctacctgagtgggggtgtgtggacctggaagcttcgagcaaccctatggcgataaagaccaaacacaggcatcttgtcatcttcagagagctctcagttccatgttgtggaactagagtaatttctttattagccatcttttctggtgtttcttaaccatcctgctaatactacaaggcaaccatttctctctttgttttcttgctgctctggccactcgccccttcactcccaaccttctgtcctcccaagttactcatacctcttgcgaccaggtgagggcctattcagatgcttaggcacatacagatacaaattaggaggcatatcaccttaggccatggtaaagagtaacagcctagtgttaattaacaatacaatggtgacccggagcttcctggtaccactgctgtttatggcagccagagcctgggacccaaaatattccataatagagatattcagtcccccacaccatgtcttcttctctctctcttttccttcctttctttctttctttctttctttctttctttctttctttctttctttctttctttctgtgttttcaacactatggccacattagccccaagggaattccaatttccagtcatttgacaattccacccccacccagctgtcatggtactggaatgtgaacctgggcatcatgcatgctaggctaatgctctcccactgagacaaggagctgtatcctcactgccttatgcttgtctttatagcccagggtagactcaaactgctatagccactggagttgctgcacttatagcttgtaccaccagacccagctcaacaatttatattgagttaaaatcaacattcatctccttatcaacaattgacattttgccagagtctataaatcatgatacttgtgaaactttctcattgatgttggtttctctgtgaagctatttgccccatacccaagacagagtgggcctaaatgtagctgagtggcgtggctgaataccaactgtcctcagttgtcaggcaccagggctctctggctgtgacagatgagacccccccacacacatacccagtgactgtgtgggctccctatgctccttccagtctttctgagtagcccaacagagctggtgtcaaatgtgcagtgaattccttgacaacattcattggcttactgtcctacagcctccttggatgggtctgccctctccctgtccagtgtgacttgggcagcctgatggcctagctccatgtgaaatctgtcctaatttaaagcagactatacaggaaaacgatctccgtagcgtggggagactggagatgcagatgtcccatgtggggatttctggaggctgcgtctctgatgaatgtgtctttaataggtagctctaggctacgggtttgttggagacatttcttttgttcctttctcagattctttggcactttctgcaatagacatgtatcaataatacatgtgttgcccttcagaaactgttgtctccggctgcttatagatggggagtttctgattaatggaaatctaggcctgacactgcaagcaatagaaatgacatttactccaataagcattcttactttccagctcccgggaattctaaacatgtttgaatcacacattctttgtgattaaatgaagagactcagagaccgggatgaatattctgatcaattcttttgtcctcctcctggtagctgcctaggcttgttacactttgaaaatggggatgatgcagtcatggggactggggtgagagcacttactgtgggagaacaaaggcctgaggccaaatccccagcacccgtgtaaaaagctgcccgaggctgtatttgactgtgatgtaaccccagtgaggtaaaccccagtgagaactcatggccaaccagcctacctgagtcactgagcttctggttcatcagaccttatctgatgaggtagagaaagatggaggaagatgcctgacatcctctggcctctgtatgcaaacacagctgcacactcgtgtgcatgcaaacacacaacaaacaccaattaattaattaattagtttaagaagctatgatgctttcttttaagaacatccaggtcctcttagcccctctttgcctcaggctagcaatagtcctaggctttctagatttatatcacagccaatgagtggacagggttccttttatcttcacccctttaggaaaacatgtactttatatccacattacagatcactaaatacaggcctatgacctcaggggcagacatacacaactttccctcttctcctttgggaagagaaacgtattcaccctgaaatctaggtgaggcatgaaattaacatgtatgcacacacagacacacagacatgggggaagcaatgttaggaaacttttaagactgaaccataagaagccttggagcatctgctcttactgtcctcagacacggcctgagatggatgcatgtctaacctgctggaagatgaaagcttggtggagagaaccaggacttctagccatcagacagatgtgtgagtggagcttactatccttctttgctttctgttgctgtgataaacaccatgacttaaaagcaacctagggaggctcgagcttacttcattttataggttatacagtctatccttgaggaaagccaaggcaggagcttgaagcagaaaccacagaaaaagtcccctttctggcttgcccagataccttgttatacagtccaggcctgcctgcctaggggatggcaccactcacaatgggctggacccgtctgtatcagttagcaattaagaaatgcctcctagctatggctaccggccaatctagacaaagaaattcttcagttgcggttctccgctcccagatgacttgtgtcaagttgatggggaagctatgacactcaccatggatggagatgtctttccatacaacaaggctgtatgacatatgggtgtcatgtgttacatagtgtgtgtggggggggcagaaagggatgttgagtgtcctactccatcaccctgtgtcttgcccctttgagacagggtctttcactgaaagtgaagctaggctagtttccaggaaccccagtgaacctcttttccttatgctttggtgttactggtatgaaggaaccagcttcccttttggcagccataacggctgaacacatgcttctatgaccttgtcccagacactagaaagtcagatgcctgtctagtgacaaggagccaatcagaagttagctggtggcgctatgctttacaaccctgggtgtgctttacggacaagcgcacagcaatgacgagcagagcatagcaaccaccctgggagggcctatgggccataacaaccagttgaccaatcaacacagggcaagccctccaagcctggaggcacaccaatcgtgagcctgtgcgtacccctagacactccccttacgctgccctataagatctttcgggagcccctaggagctgtcttttctagccatccgccatggcgggtgggtgaaagacccgagctaacatggggttagctcattaaattacaataaagcctggtgcagtttgcagcaagctctcgaatccgcctggtgattggggtggtcgcgatcccgggctaagattctggaagcctcagctttccgagggtcttacaggtacatgtaggtaggcttagcttttcccatgggtgctgggatccgaactgaggtcttgaacaacacatgtgtttactggttgagccttctccccagctgccaaatttagtttttttttttttttttttttttaaatgttgtttcttaatgcatttggatggcgaatgctaatgggcagatgggtataggagaccacttcaaatgagagtggagtgagtagatgctaacaaggggcattaacaatgccaatcaaatgaaaacaatgtattttcatttccattgtaggcaatttacctgtagtcagaaagccagtgtcgcattttttctttctgggtaaacattattgcagagtctatagaacagaatgtgccaccaatctttaaaattaatcctgaagttcaaatgagaacaaggaagattgtatttcataatttacgatggggagcatttcagagttgatttcataagagaattcattaagccagtgtcaagctatgccattttaaccgtggagtttaaagtatctttagttctgatttttttaattagtagaagcaaataaagagagtttcttctcacctgtggggaatcctgcttctgtatttcgggtaacttcaggtttgtcctgatgcagctgttctgataatcacagcgattaccaacatattgttaatttcctgagacgtccacccattgcctcagtgctggctcttatacgatcaaatgggacaaagggcacagaacctcataataagtattgattgcttctgggagaagtaggcatgggaagtgtcagacaaaatgtgatgaaaaaaattattttggtgtcagagaggctttatcgagtgtttgtctacctacttctttctctgtaacacatgcgcatttgcacatattcccacaacctggctcttaaatgtcaaccgaaggtcagcgtgttgaagtcttcatccctggggtggtgctctttgggaacagtgtttttagaggacaaggtctggggagacactttaggtaactggaggcatgtccttccaggagctagtagctccccccccacacacacacttcctctgcttttcacatctgagctgccatgctgtcattagttgcgccccaccatgtgttcctgctgtgaaggactgtgtcatctcatgtcagaatccaaaaggccaaggatgaactaactctataattaagttgattgtctcaggtatcctgtcacagtgatggacacacacacacacacacacacacgagacacataggatatcaataaagaccatatcggtggcttttaagtctcaggtcttctaaatgttttgtatttattagctcatttatccctgagtagattatatttacttactatgtatcactttgcttctaagacagaatctcctatagccaaggctggccttgatttagctacatatccaagggtgaccttgagcttctgatccctcttgccttcgcttccccagggctggcattacaggcttgaattgccatgcccagcagccaggccacacaggaggcagaaagtcaaatagaatgctgcctgagcactgactccctcggagagatgcttcctgttctcctgccccaccccaagtccatgaatagaggcctgggtagctctctgtgcagtgcttccctctgtctctagccctagctccttcttgggtggtggaaaccctgaaggacagtgccaagccaggccttggttggctgcaggtacagagcccagagggcctggtagttgtccttcagatggcttgtgcttgctgctcattttaccttatttgggttctatgcctgaacaagtagccttttcccaaagaatcgccaggagcatcctgtagtcatccacctcttactctgcctgtgttttccttctaggtgtttatgactaccaagtaataagtactgctccatggttttccattcattgtcctctaacataaaaggaagttatgagagggcagggactttcctggttgcaggcacttgctgtactcacagtggtgctgagcatatgctaggcgctcctttgtatgtgttgtcctactgtgttagttagtgccccatcactgtaacaaagtatctatggtaatcaacttataaaatgaaaaagggttgaagggaccagcttcccttctgcagccataaaggccgaacacgtgcttctatgaccttgtcctagacactagaaagtcagatgcctgcctcgtgacaaggaaccaatcagaagttagctgatggcgctatgctttaccaccctgggtgtgctttacggacaagcgcacagcaatgacacacaaagtatagcaaccaccctgggagggcctatgggccatagcaaccagttgaccaatcaacacagggcaagccctccaagcctggaggcacaccagtcctgagtctgtgcgtacccctagacactccccttacactgtcctataagatctcttgggagcccctaggagccgtcttttgctagccatccaccatggcgggtgggtgaaagacccgagctaacatggggttagcttgttaaattacaataaagcctcgtgcagtttgcagcaagctctcaaatctgcctggtgattggggtgactgcgaacgtggcctgggaccctgggtacctgagttttccgggcgtctaacagggttattttgggtcacagttcttggagttccaggccatggtacaatgtgccctctgctgaatgacagtgaccggtaagctcatgacagagcaaaactgctcacctcacagagagagtcctgtaaacccccaatgacctgaagatctcccactagacccttactttcaaagggtttgaccacccctcctagccctgcccaaggtcacaagcctttgatgcacaggcctctgggggctgtttaaaatatgagctgtaaaaaatacttttggggggttgggactcagtttcccctggggtcagaaggactggagtgaagagtctttagccaagaggcagaaaaaataaactcggtagctccaagtacaaactaagccatacgcctctcagtctccaggccccagtgctggttggaggcattctgtatacttccttgagtttgctaactcactcctcaccgagaaccactggcttctcactgggaagaagagtttggatcttgactctgtggcctgactaggaaggaaaatgcatgagaggactgtgcatcactcaggctcagctccatctaagcacagggcaccaagtctggcttgtgtgctgtaagcactcctgaggagggacctgatggggctctggagaaagggtgctcctgagtgcaggcaagtctgccatagtcacagcaacagcagcatcttcaagggacaagcttttggtttagactcaaaattttggttccgtctctacttagaagggtgaccttggaagccgggcgttggtggcgcacacctttaattccagcacttgggaggaagaggtaggcggatctctgtgagttcgagaccagcctggtctacaagagctagttccaggataggctccaaagccacagagaaagcctgtctcgaaaaaccaaaaaaaaaaaaaaaaaaaaaaaaaaagaaaaaagaaaaaaagaaggatgaccttgggaaagtcccctaactccctgtctctgttgcttctctatcactgccataagatatcatgaccaaggcatcttatacagcaattgttgatttggggcttacagtcccagagggttagagttcatgatcactggggaagggagcatgatagctagcaaggcttggtgttggagcagtagctgagagctcacatcttggacacaatcataaggcagagagagattgggcagagtctggactgatgggattgaaagaaaggcagtaagattcttcagtacattgctcttgcttagaaaccctgggatggatttgtaaggtcaattctgaatagtcaatacattataaactcaagagtctcccttgtcatcttggtacctattggtgtttagacgacagggaactttacggaggagaatcagtttcacacctaagtcactctgactctaagtgaaacacttgaccccatggttgaaatcacgctgccctcaccagtgagcaggtgaggctgatacttgtggctttcctcaagctgactgcattatctagtgttttctaatgattttggtgttggaattgggcccagggcctcaaacatgctgagtgtatgctccacaactgacctacattcaaacacacacacacacacacacacacacacacacacacacacacacagagggaaatttaaaaaaatactactattttcttagtgaaatcaaagccagaaggttggtatttgtaattcgtaaggtgggtgctggtaggttctggggaaggggagactgagcatggaaagtggaagaagtttaaagagaagggagtatgcatggtgtgtgtgtgtgtgtgtgtgtgtgtgtgtgtgtgtgtgtgtgtgtatctgactagccttttggaggagcctcatcctttagaaagtcacgactgtccatttcttcctcagcaacagatgacatttgaggataagagttgattgttggaactgatgaggagagagggccagccccgagccctttcactcagagttctgctcaaaggagtctggcagccccatgtgggggtctgatgtatagagaatgtccagaggcctgcaaagaaacctgactctgtgttgggggtcagttcccctgctgggcttaatctcagagagctacctcagtgcccaggccccttgggccaaggtttcttccttgtggaggagccctgtttgtcttatctggctagcttcctgccttagacattgactctccagggtattaagacagattatgggaagggaagatgaataagtcaccatcttctgtcccccgggagctcctggcttccacacatgcacacactgacacccacacatcgcaagactactgcaatagcaaatgcaagtgtattgcattctgtagctaccgatcttcagtctttccccgttttacttcccataatcccctagctgaggggcgggagatgttgtgggggagtagccacctactccataagcatccaagtctcaactggccggagcagctgtgcccagattaaaccgtgtccagcccacctgaaccctgaaggacttcctacaggagtggaactcgctcctctttcaccctgagtatttttgtgttttttcatttgtttgtgtgtttggtgattccgagttcctggtctcctggctgcagagcttccaagacgttgcatttctctcctatacccagttgatggtgttctcaagaccagagtcactaccccagcctcaccccacagtgttcccattcttcctattcagaggatgaagttcaggcaggcgagatggttgaacgagcgagtcaaggttcctgctgcaggctctgaccatctgaatttgagcaaggggacctacaaggtggaaaggagagaaccggattctccaagttcttctctgacctccacacatacaaaatccatataacagaattaaaaaaaaaaaaaggatgaaaatattgcttcctacccaggaaccaagggctcaaggtgaactgatgatgtgtattctaaatcttaggtgggatctaggcacagcgctgaggccctctgtctgcactggagattctgtgttccctatctatatgaagctgttacaaactgtcactgtacctgaagcattggctggtgacactggtgacaatgctaattctataattatactttgcacttctcccctcctcctggaatcacaaaaggatttatacatctttactctgaatagatccactagttaggcgaagataaaaaggctacagataaggcatttgccactggagcccggtggggagacagccaagaggaattagagagtggaactgttcactgccctcttcccctggaaatgacatttactgcaaccttctaaatgatggttttggcatgaggtctgcactaggttgtggaggtcactgaagagataattcttacctacacgagcccaggccttcatgaggatgggatggatcccaacctgcccctgtggctcctaagggaggttgcgggggatttctgtcacccagctaatgccaccctctactgggacaacctgggaggagagaaatcttcactagtgtgctccctgttcctcttgtagattcttctctgtcccaggctattccccttcttgtaaagtgacatcagagtctggaaactgaatgtcctccaaggcccacatattagagatttggttctgggtttgctctgtttgggaggtagtggaagcttccagggtaggacctagaggaaggtctttaggtcactgagaccatgtcattgaggggaataaagagaccccagacccttcctgcttctcctaagatgagtaactttgttacaccaagcataccctctgtgatgtgcaggctcaactccagccccaagtagcaaggccaactgaaacctctagagctttagggaaaacttaaccttcccattttataagttaatctcctcaggtgttttgatacaacaatgctcaataactaacacagaagctgcagagagggagcagccctgcatacttggcaagcatccctggttacagctgactgggccagggacaaagtccagaactgtctgaaaaggtgcccttcctcagacatttgagaaccagcaggaaatgtctggcctccaaagcacagtaggacttgcaaatactacagcagcatctactgggctgcagggaatcaactccattatggaaggacaattctgtgtttaggccaggcatgtagttcagtcagtagagtgctttcctaacagggaaaaagcactaggctctatgctcagctttgcataaaacagacatggtgtgcctgaagtcccaggactcaggaggtggagagtgaggagggtcagaggttcaagctcatcctcagctacttagtaagtttgaagccaatctggggcacagggcaatgtttaaaaaaaaaaaatccaaaacacatgtgttcccaatgccattccagaacattctggaatgttgccaaccagccccaaagacatttaattctctagggaaatagtctttgtttgacttactatttgctatcgattacagtccagactctatgaggttacatggtaattttttgtctggcaaagatgctaatggctttcttcttacaaaaagattttattgcctcctagcacattaaccagtgtggtctgtaaattagcatattttttcagctgttcctgatggtccattcaaacaatttgcccttcaaattgttcttgaaatattgttacattcttatggtttctctcttatgaagtcagtaaatctccacagtgttcagaggaggatggttttcactttttgaaagttgtgttttgacaatttgactaaaagccccaggagagagttctatgaattgttgggttttggtgagagctaaagaaagaagaagcagtctattctggcttgaggttcattctcaaaaattgagagtcctggactagggtcccctatggagatggtgtgagatcacatgcgtcattagaaacactggggctagaataagagaaccaaagtagggatgatgggaggggagagaaaagagttaacatacacactgaattcagcaagccaagactattggttttgctgggtagggactaggggacagggctctggcaatttggtgagcattatcacttaggatgcagcaaaagattgtcaacactcatgtcttaggtcttggtaacattagcaaaaatagtgtaaggagttaaatgagtttctatgtttaagttgcccagaagagttaggagccttcctcctgtgtgtctctctatggcgaccggccatggcggtcagccatttaccttgttcctcatcttagtctccccattctgccgggcattataataaacttatagtcttatgtctcatgtctcagcaatttctcttttcttctttttaaacaaaagaataacattttggcgcccggacgtggaaaggctctgaccttataccttctcccgcgacccactggcgggcgcgtgttaggcaagggtatccttacagcccacttccatctccgcttttgctggtattccctcctgcctgcagcatcctgagatgccggaactcaacttgaggcttttccaactaagtatttctggaactcactgatctgcctattcgctacaatccggtaagaaacccaaaccgttcctatggggcagacccagtgctgttcactctgggtccatttttcggtttcgggccgggtgctctcagacagggcagtctgtgccattttttggccttgcccacgggaaatacatttttatgggatctttcggttactgccagcgagtaggtaaatgagcggagttctgcctcccagtgggaactttctttcacctgggaatgtccctcattgttctgattgttctatttctgattgtgtttcctcttggttggcaatgtctgcttgagacgctctaagaggttttttttgttgttgttgttgttgtttttttgttttgtttgctggttttcatttttccacatgaatgaggtttgaaacttttctggcaattgagaatatgcttacaggggtcgccatctcaaccacgtgggctaacctgggggccgccatcttggtcataaccatgtgacctagcttaggcctacccactcacttcagtgacttacacgggcaagcactgccacctgacatcttgctttttatttctttcacttgttgggtgcatttcctaaaggtcaggcatgggatcccgctccaggaacggtgcttttttgctttttcagtttggactgctgggtccttttttggtttcgggacagctgtgtccccttcggggccaggcccctggcaactcccacgggcagatgtgcatccggagaggagctttttgccggttttccacttgcctcacccatgggaaatgcatagaggaacctttctggtttcatccaacaagcaggtaaacagacaaaagtggcttacggttgccgccgttttggtcatgtgacctacctgtaggcatgcacaactccagtggcctatgccagcaaacctgtctgccggatttttgatttctgccagatctttttgctttttattttatttttttctctatgatttcttctttcactggctctgtcgttcatggcttgtttactaaatactatgcctttccagggccctctgtttaagtctaccctgtctctttaaatctcctatctgtttgctacaatgtatggatcagagattacattctggttccccctttactgttatccagtcctgcttgtctttatacctgtaatttaattttatacttatctagctctatatacaatttaaattaaactatactaagtctcatatttctaaattgctatatatctttaaatgatggtaaacatttaaggtcataaaggtctaatttaactatacttaaaatataagccaagtctatacaacttaaatttaactcttgtatctttaaatgatgatgaaagtttaaaatcataatggtctatttcaaattaacaaaatatttataccactcagtctttcctataagccgtttacaaaggtacagcttttattacaaaaagggatttttctctaactaaaggcaaacttataactgctgagatactaaacagacgacagccctcaaatgctcagagatctagagaatatggcatttaaaatgttttgttaaaaagctttttataacagagagataggccagctgctggccccaccccatttcctctgagaagactgatgggcactgaataaacttcatctcgagtcagtgacaacgctggtcattgagcaaccctgcccttcacctcaactactgcaaagtattccagaccttggacaagaggacaacggaattgactttcccaagttgcttgggccaacggtaggcgagtcttcccaaagtctgtaatccacaggtcacatgctatcagcaagaaggcaggtgtcctacagcccactactatggatggaggaccttgggggtggctgtccatgcagcctgctggcaagtctctgttattctttaatcattgattcaggtaaaatcttatccttctcaagaactctgatgcttttgacgactggtagtcttgccagcttaaagcaaaacagattccaggaacaggtattttagggtttatctatgtaaagataggaatgtctaagatgtataaaagtctgagaatgtagttacgaaggcctgaggataaaaaggcttaaatgatgataaaatgagttgagacattaaaaagaataaaatacgttcctgatttctctatttctcatgctactgttcatagtaaagttcaacaataccactataggatcataactacaaggtcaagattaagatgcttttcattgtccaaaaaaaaaaaaatctgtctattttaaaatggtaatactttcagccaagttgcttctaacatgaatatgcttctaacatgtctaatacttatgtttctacaaactctaaggattcttgtaagttccagggagctgaattggatccaaacaaacaggtcagattcactccagttattcagtcattccctggtcccaggactcccttccctcatgttaggactcctcgggaacccctccctcatcttacaatcttcccctcaagtgacaggacctaagaaaaatttttttctaaacttaaccttgtcctctgttctgctaacatcttgccaggtctaaaaggcaccagagtgtaccatatggcccggactgcaacgaaacaacaatcaaccccaggacatggcagcaccccaaacccccaaagacggtcaatgccccaggccagcaggaagcagccttaagacatctttgcccctacttccctaacctgccatgcccaattctccaacttttataataaacaacagctgggattgtaagaacaatacacctggatgaccctgaccccgccccctaacaacggggcactcacccgccatgcattgcaacctgtgaggtgcaaaaccccagtgcgcatatgcaacctttcttttaaaaggtcctgccacccatccctcgctctcttcctttggctcctcttgggttggctgactacccatcccctctctctgtttccccgctctgtctctctatggcgaccggccatggcggtcagccatttaccctgttcctcttcttagtctccccattctgccgggccttataataaacttatagtcaatatgtctgtctcagcatttctcttttcttctttttaaacaaaagaataacactgtgactgccctttaccacttctgccattgatattatggggaagagattccaggaaaataattgtctcatcccatgtttgtcttttgacacagggtttcactatttagtcctggctgtcctggaactcatcatgtagaccaggcttaccttgaaactcaaagatatctgcctacctctgtctcctcagtgctgggattgaagatgtgcaccaccatgcctggttcctcattcatgtgtttgcacagatataattactataaaaaggatttattttattgtttggctttttcaagacagggtttctctgtgtagtccttgctggaactcattttgtagaccaggctggcaacgcattcacagaaatccacctgtttctgggattaaaggtgtatgctaccacagtccagcataaaaaagaatttaaatccaggattttctgtttcttctttttaaaaaataactatgtgactcctgtaggtgaacctgtagccacgcctgtgagggtgtggtcagggtgatgtagagggagaggatcagggcttcgtttcagtttcatttccccctttcagcttgcgtacagactgctgccacactggctggctaggtcgctctgtaagtaaggcttttccctattaaatacccttatatttccatttgactccgtattggtaatttcccactatagactccttccttccttccttcctttcttccttccttccttccttccttccttccttccttcgctttctccttttctcttcattccttccctccctctcttctcctgctcttcctccctcccttccttccctccctttttcctctttaatttctcaaacatgtctttaaggcaccgtgtaggctcctgggtcacaacaataaacaaagttcttgctctcttcagagtttgcattcctgggagaaggggacacacacacgcgcgcgcgcgcacacacacacacacacacacacacacaagaaatgaagaaagaaaagaaaattctcgcatgacaataaaaccatatggaaatcatagtctccgtgtttactgccttgtaacaccaccaccaccaaacatgttcctgtgcacccggagaagatgtcgcagacacacctgcagttctctccttccaaggcctttggcacaggctcagcagcttgtagcagacaaagatgctggaggccacagtggtgctggctgctgaatgcctcaacactggtttatgacaaaggcagcgactgccatggttgaccatgtggcctgagacaaaacggtgcatgcaatgcagcagcagcccttttcgtagcttctgtgtgtatttgatggcgcaggttcttgctaagaaaatgtgggtgttattctctattaagtgctaagaatatgcctcctcatcagcaaatcagggggcagggctggaggtgcagctcagaatagagctcctgcctagctggcactggacaaaccaccacagctacttgcttgcttcagctgggcacaggggttcttaagaggcataagcaggaggaccaagagatcaaggcaacttgggctacgtaatgagaccctgactcaaagaaacaaagggaccatgaaggctgagaaggagagaagaggaggtatggtgtgggatggaccagttgtgtcaccagtcaaaggactgggggcctgcctgctttttgtcccttggtgtttggcagcagtgggtggatgtggcagttgacaggtgggaatggccatgggttgcatctattggtagcatccttgtgtaggcatcagataccagagcctcaaccctacacgtgttgaaacgcctgtgtttgcctaggaagttaagattcctcagtccttggctgggtggcctaggtgttagggtttcacagcctttggcagaagtcaatgttatctcttgggtgggcctgggaaagcataactgcccagaccctaacattagctatcttatcactgagacctgtagccctcaacacttgacattccctggaactcctgtttggctccttacagcctctagctgtcttcagcctcagccattcaccctttgctaacatatacttcctccaccctttctccttccaaggctgctctcaagctgttcagctactttctctttaactgcatagcagccacctatctggccacattcacagtttggcctgccaactgctctgctgtcagtgccaactgctgctcttttggccctgcagtcacctctacattggtgtctctgttgcttctttctttgtgttaccaggtgagcccacactacaaaaagaagacaagggaagaccacccgagctagtcttgtggggcttcatgttgaaacacctggagagacagcacagattatgtctcccaggtcaatcactgaggacaagcgtatgacaagagctgtccattccaaatcacatccttgcctcttgaacaccaatcacagtcatagatgtttacatttggaccaatcacagcttttctcggcagtaccctgggcaccatgggaagtgctcctccttcagcatagatggaaatagttacaggatcatctagagtttccagaggcttgtgataattgcaagatggctggtacagatcatttagagctgccctgcagttgggacaatttgcttcagttcttgtgtagctttcaaaatgggtctgccgaaagtcccagtcgctagtgcttgtacagagttgggctggccagccacataagtgaagtctttttactcaaagcatctgggaaggtatgggaaagagcaacagccactaattaggggatccaattgctatattctgaccacatctttgcttatttacaagaaaatgaacatcaggagcttttacagtacacatttaaagaacttaccattaacactaactgatttgaataattcttaatgactgttggaaggcagggtagggggtgtcccaaggaaaagtgggtatttctctgtctcagccagagtaggggtgtatccctatgggctgttgctggccggaagtggctgacacagaaattcaggtaatatagataaatcaaggacagatcagggatagtgtgtggaggaggcagggacagcatatgcacctttgctcaccaataaagccaaacatacaagtgataaagagcccatgcctctgcagatgtgcgtcaccatgctctctgatcagctttcctgaagtgtctgctgccgggaaagccaactcttcacacaattccatctgcttctacctttctagaattatctttcaccaacctgttacttaccctgggcttcagctactttgttttaatcactgtgatctgacaattctcaggtgctgtcctgttttgactgtctcccctttaccccccccccccccgtgccaatagctccgttctcagttctgtggatgctgatgtcatggcctctccattgtcccctgtttgtcaatggtcatctgacagcctccagttccactaatctcccccttggcctgacaaagcagagcaagcccagaatcatttatgtgtagctgtctgtatcttcaagtccgcccagctcctgatgctcacagagggtggggcagaaacactaagcccaaagctttcattccttttaagagtaagcttaacaatatcctagaaagcactcaggcatgtcaggctcattcatttcttcttgtgcgcaactaactgccacaaacatggcagtgcaaagtccatgattccaaagcttttataattcagaggtttgggtgctacatggctggatgctgtgcctgagaatctcacagggctgaaatcaggcagaccatcatctagagcctcatgtcttccttcaagcccactgctttgggaatgagttcctgaagtttaagaatgaagttcctgaattcttgccatctgtgggggtgcacgcatcttcctccctctctgtctccccacccctttctctctctctctgagtgcttgcactcagctcctaaactgtgggaaggagtaagagtatcctgcatagatgagaattcatgacagaaacgtggccatgtcaaggatgccaatgccttggactcatgggagttgcaaggtctaccccaggtcaggctcaggagaatggcaaggacttctgtctcaagtatagatattgatatgtgtttgatctctagctaaaaggagtgcatgcaaaaagcacagaaagtagctcctttgtcagggatgagggcatgaccatacttccccgagacttctcccctacagataccacctaatgaacctcctactgagattagctggctcacatcctcattcatgctgtatataacaaacttgatggatgtccaggctgctgctgcatctccatgctcatggcctacttgatcccaactttatattacaaggttttctttctttctttctttctttctttctttcttttttctttctttcttctcttttctttcttttcttttcttttttttttttttttttgagacagggtttctctgtgtagccctagctgtcctggaacttgatttgtagaccaggctggcctcaaactcacagagatctgcctgcctctgcctcccttgtgctgggattaaagccttgtgccactacacccagcttgtgtttctttcttaatctcctgtccttcacagtcaggtctctaggacccagccacataggctgtagcactgaactgggtacttatcatagggtcctatccatgtttgaagcctacaaatggatctcttcacggaatgtccttcatgctttgtgtttctaactctcccagtctctgactcctagatctggaattgaaggatgaactggctggttttgtgtgtcaacttgacacaagctagagtcatcagagaggaaggagcctcaggtgaggaaatgcctccatgagatccagctgtaaggcattttctcaattagtgatcaatgggggagtgcccagtccatggtgggtggtaccgtccctgggctggtggttctgggttctataagaaagcaggctgagtaagccaagagaagcaagccagtaagcagctcccctctatgacctctgtatcaacttctgccctgcttttgttcttgccctgactttcttcagtgatgaacagaaatataagccaaataaaccctttcttccccaacttgctttctggtaatggtcatcacagcaattgaaaccctaagtaagacaaattggtaccagcatagtgggatattgctctggcatgagtaaagagttctgtgggagtttggaagacaaaaatgttgagaacagggtaaaggatggaggcctggcttgtgaagcttcagagagaaatgtaaagactctatcagggccatttgttctcttctggttatctggagctgaaaaatcagctctgattaacaagatactagaactactaaatccagactttgctttgctggaatacttgatgctggtcagctggagctaagaaataagtggtaactaagaagaatccagtatcactgaggtgaaatctgagaagtgtttcatgagatcacagagaagctgtattccagaggtggccaaagttgtacctcatgctggcaagtggacttggtaatgtcaagagtcacccaggtggcactggttttgaaggcatgaaggaggcatggagaacagctgaggcctgacactgtgataggccaggagaggtcactggtgaaggtgcagcctcagtggcagttgaaggcccaggaatgaaggggtcatgcaaagaagttgaagtttgtcaccatgaagagagcctaggagaggctgttggtgaaactgcaggccagttgcagaagaagaccccaccaccgccaccagcgttttggagatgccagtaccatgaatgccagtaccatgcagtggagtagagccagccagagcctagaagacaagctatgtgtgctgcagagctggggaagggacccaaaccctttggaggattggagaagatggtgagtggatcccatccattggatggctggaattttattttgtttggatttgattgtgactatgacctggtttttccatcttaaagtaagaaagtattttactggattccacagttgagagactgatttttaaaagactttggattttaagagattggctattttaaagggcctgaaattttaatgtgtttgaatttgtgaagactgtgggacttttaaagttatttgtgtttttaatgtgagatcttgggaatgaataagaaaaggaagggttgtggcttaatagtatgtatttgtgggtcaagtggacacactaggacatctctcttttgctgtatgctttgccataacttcatcctgggactcattcagggttctacccacactcagaggtgctcagtataaatgtgagagacaccagggtcatctttgaatcacaattattctatgtatttatcaaagtgcacttggtgatggtaggccatttggatcccattctttcctaaattgtatttataatttcttgtgttcatatgtgagtcccattttctgagaagttgacctaacattttcatcagattctttatgggctgtgagattgttcacccaccacagaaattcacacccagggaattaagttggaactctggtgactgaacagactgtgtgtggggaaacctaccttggaagaaggagcataggctcggggtgggggggatggggggtgggagtgggggtgggtggggatggaggggaggtggagtgggtggggtggggtggggaggtggcaggtgggtggggagggagctcggttttttatctcattcccagtgtcttagtcatgagactttagatgactcactttctctgggcctcatttgcaaatggagataataatagcagatcttatctctggtgattagaaagttgaaaaatgtgccaaggtgcttttcaaactgtgaagtgctagtgtttgcctattgccttatcagtgtgaaaagacattgggaagttggtgggtgttatggttgcatggaaaatgttccccacaagctgctgagcttgtttggtttccagtgggtgctcctattttttgaggttttggatccttaggtgatgagacctagttgaaggagtgagtctgtttcatggtacttaagagacatatggaatccaccctgccatgctttccactctacaatggactgtaccctctcaaaccatgagccaaaagaaacccttccttaagttgcatcttgtcaggtgtttggccacagtgataaggaagcaaatttatacagtatggcagaacatttgcattgaaggggaaaatcgaactacttttatcagaattaaaattttaggtactatgttctttgcgaagactgttggtcacgcagaccaggaacattttgcagccttcatggaatgttaggaaatgctattttaaggtgtgttacttttgtttatgttgcatttgtttaactgtgttactgtgcctatctaaaacatctgatgctctaataaagagtagaacagccaataacaagggaggagagagggagaggcagggctggcaagcagagagggagaggcagggctggcaagcagagaggataaatgtgaggagcgatatgggaggagaaaggattgggagtgagagaggaaagaggaggacttcaggggccagccacccggccacccggccacccggccacccggcacccggccacccggcacccggccacccggccacccggccccggccaccggtcccgggccacccggcacggccacccggccaccccggccacccggctacatagccagacatggagtgagaaggaaaggaaaggtatacaggaataaagaaagatgaaagctccgaggccaatgatagaagggataatttaagaaaagctagcaagacacaagccaagctaaggctgggcactcaaaactaagaataagcttctgtgtgtgacttgtttgggagctgggtggcaggtcccccaaaagacctaaagagcaaagagccaaaatagtaaaacatcacacaacaatggaaggttcaaatatttacatcaggagttgaaagtcatctaagcctttgggacaggagagatcattttagagatgacccttagggatagaactaaggatacataggaaaattgtaggagaccaaaattgaaactaattaaatatttaacaatagagattatttaatgatactggaaacattatttaaataacaacattccattgcctttaaatatttaatatggaaagatgctaataataaatagttaagcataaaaataacacagtttgttcattcttcaaagacatctagaaggatttacacacaaaattttgaaaatggttgatctcttgtgatgaaatttggataaaaaggcacatttatatattgatttttatattattttttcatttaaaatgatcttcagataaccagagtcctatttttatatcagttgattatcaagtgacgaagtgtggccctgtggagaggtctctggaagtcactgttggtctctgttccaagctatgtttcagtgaagagattaaataacctaccttgactactgtcacctcttagaacctgtagagaattcacacatagactctttcctctagtcttctgtacaagtgctcccacctcctcctgctagcagtcagttggggacttctctagaaactttctgagaccttgtggttggactgtgtgcttttgcctctgctattgtaattactacctagctgtgaaaactgtacttttcatgccaccaccctgtcattcccttcaaatgcaagagctattatttcgtctaagaatccaatgacctgacacaatggctatcacaggtctgacactctgctccataaaatctattgtccccaagtgaattaacacacagaaaggcgtaccaggattttgaggatcagggttatgtcctaccctgctgtggtgtgatgctttaagtctaagcttactgcttgtgagctgtaggttctctgtgcagctcagtcactctctgaacttccaattccaggcttggcctcaaagcctttcccaccccactcctggaactaaaagtctatcctttacctctcagatctcaatagagaatggggcctcctaaatagagatgaactccctgtatcatctgttccaaattgttggatactgtttgaaaatcagatccttggttcctactctagactggaggatgaagactggctgtaggaacgtgtgaggatctatgctgttatcacattttctgtgtggctctgtccctaaagcttgaacaccagcagttcagagccaagatgctgggcataagcttctctgaggcagttaacttctttgcctctacaactgaaggggattttgttattggtcctttctacttctggtcgctgacacctgttctgtaatctcttgaatcattgacatcctttcacttatgagtaggaaatcaatctaacatgatttaaacaaaaatagtgcttcttgtaaaacttcataaggatcagccttcaggcttggctccatcgaggcctacatattctgtcaccaggaggtggtttctttctgttttcatatttgactgtgccgtgctacttgttggctccgtttctgataggattgaatctgtatcacagaattactgaaaaggctgtagagccttttaagttttattatattttattttatttatttttttgtgtgtgtgcatgttatatctgtgtacatgtttgacgtatatgtgcatgcttcatgtatgaacttgcaattggaggccaaggccaacgtcagattgttattcttttgtttaaaaagaatagaaaagagaaatgctgagacatgagacataagactataagtttattataaggcccggcagaatggggagactaagaagaggaacaggggtaaatggctgaccggcatggcccgtcgccatagagagagcacataggtgacagagagtagaaaggaagctgagaggaaacagagcgggggaaacagagagagggaacagagagagtaaatgggcaggggcctatcttttaacggggtcctctgtatctgcgtgcagacgtagttcccatggaaccttgggctgaccagggtactgcctgttccaccaggtaacaggggcaggccagcataatgcctgaacctttcacagatggctctccattttattttttgagacaggatcactcactggagcttagtaattcagtctgactggttggccaggtatactcctgtctccaactcctcagtacagggatttccagtgtacaactccacatttggctctttgtgctggagtttcaaactcagatcttcattacttacttaagtagctacccagcttcagggagaatagatcctgagatgcccttccgtaaacaatgggttatgcctagaacatcataacacaggcagcgctctgtcttccagtccaacctcctatatccgagatggagtggggggtggggaggggagctgaccctgtgtagcccagggcttcccatactctgttctatttgcagtcctaccagccatgggcctcccatctcaggagggcctggttcctaagtaccacccacccacccaccgtcagtcagtcccacaccagaagtaagacggaaatttcttttgaaagccggagcggggagataatcaactgaaccgagatagaaccaggcatatgaaaacctcttctgtagaagccctttgccactgccagagaggatttcagtccaactcttaaaagcactggctaattcgccccctacaggctgtgctgccagttgggctcagggccccatgcagagaatggattggagataagacgcttggctttgttcctgcaggaaaaagcttttcccacccggctggggcgagctgacagcccctgctggagttggagataatgaaaagggaggctaggtgggagccagcctgggtcagggaccagcctttgttgtctggaccacaagccagaatgggggctttgagggggtcccagtgtgtctggctttgctgtgtgaggtatagactgcctgtgtccttctcttacctgatttgagctgagccaaatcttcatagataacacgccttctgcatggggactgctttgctgaggacaaatgaaatcaaagaaaagcagagctttgagaccctgctaagccgtcaactccagacaggcacacagaacatacatacacctgggccatgcacctcaacagcccaggcgtggagaggcagcgtggggcttgtcttgcttccctccattgttaagggcagggagccgctgacactcagttctccatccttccattagcagccagagagccctcactcgtaatttgcttatgttttctgagtatccagagatctgacagtgtttgagacatgggttacttcaaggaattgatgcaggatgccagttaagaaagcaaaatatataggtgccctctaaagctgtagagcctaaaggagcttgtcaccaatcacacgttttctaagcctctgccttgcaactggggatatgggctagtctgaattctctcagcagttaggagatttgagacaatgaaacactggggcggggacatgataacacacttctttgctttgcgttctgggactttctatggtatccctggcggtgggagtttccagtccccctgaaggtacattcaccatggctatgagacaactcaggcagcggggcggggccgttcttcagatgagcttgcctcattcttgcagtgggattggtctcctgtagacccaagaaacctgccagaagtggccttttggagccactacgatgatcccatattcaggaccccagctctgtttccaagccacatctctccatctgctaaagcttggcatatcaatacggactctggtaagctgcctccggccctcttgccagggaagcaacactggttatgaacaatgaggccacatctggtatgggggaaagatgaattaactggtactttgtgggatgtcttaggaccttagagaaagtgacacaccggatgactgactgagtcatttagagggtcttcggaagacaactgtcagaagaacagggggagtacccacgcttgggataaagcatccaggtaggatgatttgtgagagctctgcccccttgctgcatgccgtgggccatcaacagtattgaagttggtttgcatgtggtgtttgcatgtaccagtatttgtgagtgtgcacaggcctgttcagatacatggagactggagatcaacatcagatgtcttcgtctattgctcttcatcccccctccccccccacggcgcccaagctagtctcttactgaacctggagctcaccaattggctaggccagcaagccccagcggccctcctgtctctgccttcctcagggctggggttacaggtgcatactgctatactcacaggtcctgatgcttgcacagcaagcactctaccccctgaactagttccctagccattcacggttgttttgttgttgctcacctcccccttctagccctgatctaatgcagccatcggggacatctgttttactatagccatcacaggacttcttttatttccaactagtggagtccagtggactttgtaaaacaactgaataacaaacaaacaaacaaaacccccaaaagatccaactggacaggctataaggcagttttcataaatgtcacaccattgcttttctgtcccgtcaactaagttcaggttaccatagggctctgatctacttgtaaagttttgctcagagacttggacttaaaagtaactgtcttggattttgtacccatagcacccaaaacaaatggatcaatgtcaagtaatgagatcatctatcaagatgtttagttagttgtgccatgcaaaataatcatctccactaagtctttagagaattgagtggtgggtggggctggagagatgtttcagggctcaagaagcatggacagctcttgaagaggacccaggttcagttcccagcaccttggtcagagtgcacataactatctgtaactccatctccagggtatctaatgcccatgggaaccttcactgaatgtgcacacccaaatgcagacattatatatatatcttgtgtaagatggttggtatggcttagatctagaatgttctcttctaaaggcctgtgtgttaactacttggtcctcagcttagttccattacaaagtggacagctttaagaggtagggcctaatgggaggttattaggtccctggggtcatggctgtgaaggagatggtggggatcccagtctcttgcccttcttctaatgtatctttattttattttattttttgagacaagtggctttggtacattaggcactcctggcattggggtcacaaggtgatgaaaccaactgtccctggactgaagcctttgaaactgtaaacctacacaaactttacttattgtaaattgatttgttgcaataatgggaatctcatgtgataagggagccacaggatggaaggcattggctccctgactcagaaaacaccctcctgctgatggcaagatgtattttgggcctgatgtctatgggtgataaacgtctatgatgtatatgtgtgcacatgcagtgtgtgtgtgtgtcagggagtcaggcacaggtatggaggtcagaaaatgactttgcagagtcagttctctccttcagctttcccagggatctgggaatcaaattcaggtgagtaggttttcgtatcaggtttgcccactgagtcctcttgctgcccactttatggtgttttgagctatgctaaattcagggagtaatttttttttattagggaggtcagtatcatttcttttttattttttaaaacaatttattttttgtacaacaagaaaatttacacagcaaatactgtgttacatactgatttgatacagtttttaaacaagaaaaaaaattcagcttacaacccctcctccaacaaattaaaatatcactttttctaaatggatcaatgtgatgaatgtattcagtgactagccaaggtaactagtcatgtctaatccctatcacatgaccactcaatgaaattataaagaaaccactgcctcaaaggaatagtgtgtgggattctttggggattcaaaattgttcttgctattccaatatccagaaagtggaatttacatatccactatgaaaaaaaaaaacaaaaacaacaaccaaaaacctatgataggattgaaactaggaaaaaaattattatatcttttatacccaggttatttctaaaactgcaattgctaaccccagaattctgcatttagttaaactatacccaaacaaatcaaactagcgaagctcgttttaaaagatacaatcaataatcctggcttcttacttacctggcccatgaattggcaggggaggctagatccaaaacacattgctttcttggaaaattccattcaagatatatttggttctttatccgtagagaaatcacttcagctctgattggaacattgctgtttctgccagataacatggctttctcctcagcccatggttgctgcagcaaactcagtttgccttttagtgcttaagcaaaaagtaaggcaggggtgggttggagttggagaggcaagcttcttccttgtagagagaggcagagaggactggcagttgacaaggagccaggacaaacaaagaaggaagagtgcagtgtgtctggatgatgtttctgggcttgtctaccagttgcctagggtgccatgcactaaccaggtcacatcccatttacttccaatgccattgccgtgtcagatggttccaacacaaaataacccatcaacttttatgtttcctgacaatataaaataaaaagtggaatgcattagagacttttaaagaaaaaaaaaaacatgtctagacattgacagtccttggcagcttgttttgttgtcatacatttaggcacctgtattggctatctattacacaacagaagagtctaaagcttgtgctgacaatgccaagaattcatttcctgataaagtttttgagggcaggaaaatgagaatgcctaggatgggtgttctgactcaggcgatctctctctctctctctctctctgttttttgagacatggtttcttggtgtagccttggctgttggaactcactctgtagaccaggctggcctcgaactcacagagatccacctgcctctgcctcccgagtgctgggattaaaggtgtgcgccaccaatgtccagctgctcagagcctcatgaggcagtgagtgagatgatgtctgggaattggctgtgtgagggctacactgcatttgagggtctgcttctagaaggttcactcactgtggctcgaggcaggaagccctggttcctcattagatgggttatgctgcagggatgcacactgtatgtcagcttttttttttttttttttttccacacagtgggaagttcatgattgaatgaagaaaactgcatgtttcaggggagaaactgtcatgaaatacgactgtaactatatgctatgaactatgctataattattacatagttataacagctatgctatagttgggcttggagatattttcccagctttcctctcccactgatactgtaagctataaaaaggctacagtagcagtcaggcagacagacagttatctttgaaatggctgagtgtcctcagtatcccatacaatgcaaaaaagtaaaaatcctatctgaagtgcttagttgaggacatcatgggcttaacggttcctatctaatgacatgcatattgagatactctttatattgtgtatttatcagcatcaaacagaacttcatgcaagtaaatattgacattgctttccacgaatttttttttttttctggccagtatgcttgttgacaaattgcatggaccataaaaagtagaaaacgaagaaagttaatgcagggagccacatttgatttgtagtattagtgacatagtataaattacatgctcacagtaagattgacttattcaggagctctcttaaactgctccctttgattaacagagaggcaaaggcaactttgggtaaccttggatgctttgatgtgttgtgttgactttgacggatatcagggagcattggttctaagagctgactctagcatgccacagttctgagcagaagacactggcttcaacatcagctcctataaagacaaggtcagaagaggaagggcccttggtcatgaattagtacaatctttccgtttttccatcatagagaccacggctcaccaaaggggaaggtctcctgcatttcccagtggttagatggccaatcagatctcctagctcctgtcctgacttctctctggagtccatgtttcctcttgcaatagctgccaccaacccactgagcaggagcctactggctgtcattagctttttcagcattcttattctttgcaaattgtccttcaaacatttgcagaatgtaagaatgtaatgatagacaatttatgtgtatgtgcatgtgcgtgggtgcgtgtgtgtgtgtgtgtgtgtgtgtgtgtgtgtgtgtgtgtgtatgtgtgtgtgtacatgtgtgtgtgtatgtgcatgtgtgtgtgtatatctgtgtgtgtgtgtgcatgtatgtgtgtgtgtatgtgtgtgtatgtgtatatgtgtgtgtgtgtgtatgtgcatgtgcatgtgtgtgtgtgtatatctgtatgtatgtgctcgtgtgtgtatgtgtgtgtgtgagtgtgtgtatgtgtgtgtatgtgtgtgtgtgtgcatgtgcatgtgcatgtgtgtgtatgtgcatttgcatctgtgtgtgtatatatctgtgcgtatgtgtgcgtgtgtatgtgtgtgtgtatgtgtgtgtatgtgtgtatgtgtgtgtgagagtgtgtgtgtgagagtgtgtgtgtgagtgtgtatgtgtgagtgagtgtgtgtgtgagtttgtatgtgtgagtgtgtgtgtgtgtgtgagtgtgtgtgtgagtgtgtatgtgtgagtgagtgtgtgtgtgtatgtgtgtgtatgtgtgtgtgagagtgtgtgtgtgtgtgagtgtgtatgtgtgagtgagtgtgtgtgtgtgtgtgtgtgagtttgtatgtgtgagtgtgtgtgtgtgtgtgagtgtgtattgtgagtgagtgtgtgtgtgtgtgtgtgtgtgtgtgtgtgtgtgtgtaagctaaaggacaactgagagctccatctactaaaatttttttctagataatatctctcagtggtctggtactttccagataggctaggatatctggacagtgagccctaaggacctacctacctgtgtctgtttctttaccaccatgcttggattttttttttaaatgtgtgttctgggaagtctaactaagagccttgtcctttaaaggcaagcactttgctgacttagttatctcttaagactgagagaaaagatttttatggttttactatttctagggattgtttagattcatttaatacccccaaccctgtgaggttgtcatttcctttgatagccgaggctgtcactcaaggctgcataggtaggaaatgttagccatggccttgaaatcctgacccattagctctggagctcatgacctttggcatcagactgtaactgattgaaatgtttaccaacaaactttcccactgagctaaggttatttgggcatgagtcttcacttgcgatgcatgttgacttgtacggatttctatttaggcttaaggatttggaatagttcaacccctttaagaacatcttccaggaatgcctttaagatggaaggccattattttgttgccagattctgggaatatatctctctgaacactttcctactccacagtacagtagctattctctttttagccagcccagcatgcagagggctagaaatggaaactttgggtcttagtcccagagtggcagttggttctgctactagccatcaaaccctgtgagcgttgagtctgtaggaagaaatgtcagccatcccataatcctttgtgaaagtgcctatccaagcaagacttgttatagtatgctgcagcccagtatcaggtgtcgggggagcagctggtcactcccagactactcgcaacatacaggcagagctcacttctaccatagagagccaaggttagatgctttaccaagaagtcaaatggaactccattcaccaattacaccgcctgcacccacaggcctcacaatgagttacaaggcaaagcgctacactattcctgggggggttctccttccctttctttcagcagctagatcataccgtaattcacacaccatgcaacccgccgatttgagcatacaacttgatgttgttttacagccccaaagctatacagataattttagggtattttaccacccttccccctaaacccattctcattagcagtcacccccacaccttgctcctcctctccagagccacaggaactagagcccagagctgcctttgccattgctgtgaatctactttgtctaaagacctgctagtttgggacagttcatctatgcagaaacgtcacagctggcatctttcacctggtgtgtttttgaggtccatccagataccaggacttcgtttatttttataacatggtagtgggtgtctgcactaattttcacctgcccaccagtgaccagacacctgggccgcttcaaagtgttctgtattacatgcttatgcctagttatgtttctccatcagttagtaggtactccagctgttctccccttgggtttctattagcaacgtttatgaacccatttctgtttggacccatgttttcatctttcctgggtgcgcactgtagactggagtcactggcccctgaagtgagtctgtgtttctgattgaggatctgaaactggttttgaaagccaccatgtgctctcaccagcaatggcaagaagcactgagccttcttgtcgagcacatttaatctgtttaatgagaactgaggtttaatttccagttgatagaacacattgggagggaaaacagttaatggactcgaagaggcagcgctcagaaagttcagaggcaggctgggcagacctggcctgctcgcctcacaaagtcagagtgcagcatcctgaaatagaagggctggcaatgacttcccgattgaaaagtgtcaaataatctgatatgtacatcataattaggttctggttagaactaaagcattattctaaaagatttttttgtatcaagttgggacatttaaatacaatggagccaggaaattatattttcttagatatgatatttgaattgtagttacacgggataaagtttgcatttatttttaaattcttattcttttttataagttatggctgaattaggggcctatgtgttatacatagagcgcacttttgagttgtttagtaaccttttttatttcccgtctctctgttggtctgtctctgtttggccccacccatcttgtgtacacaaaataaaccacaggggctatcagaggtcccagtgaacagaagggaagggtgttcagtgcatactcccaaagcttttcccactgttgacatttcttacataataaaagttggggtggaaagagattatttgctccatgatttatagttttagccatgtcttcctgggaaatgaatttgcagtcatttcaagggcaagggccctactttgtaaggtggtagccctagtaccagggccagtgttcaggaccttgtaggagtctatcactaatgtctccatacaggtgcccgtcgttaaccagggcaatagagaaattcacagtgattaataattctaatagtgttgctggagtggaaggcagtctgacatccttcactctttatggctctagcttggaaaatgagagggtggtaattgcagtcatgttcccaatgcctgccagcaaaacaaacttttctaactttgctcccagcacagttgatgaaaaagaaaatagaaatcagccagtctcccaattagcatcactcaagttcactgctgtttctgcccaagctgatggcaagtctgcgaagttaaaccctgaaacaatacagaactcctggggtgtcgcatgcttgctattgtcctaaggagagggttcggagagtttcatggcaaacatgctccattctgttactcaaagtttacgtcaatgactagctttggtggaaggtggcctctctgggggcttacagtgatatcaaagagctaaggaaagcaatggtatcctagtattattttcataattctattcgcccttgactgccactgccaggagatgggagttgtctctgtcacaacacagaattttcattttgaaatacgaactttgtcatttcttctctgtggcattggttttaagatggtcgtgtaaatgctagaattgtaacatgtgccctgagagagcccaaaaagtcagtgtggacatgagggacatctgtaaggccactcctcatctaagacagtgcatcccagtttacctaaagatatctaatttcagacatttgccttgttattgctacaaacagatggaaatcctaaacaagcctttattttgtatacaaatctgtatttctcagatctcttattttccattagtgatacaaaaatctgcccttcctttgtgcagtagatttgaccaggttttgtaaaacagtctcacagagtcgttatttccctgggttatttctctgaaggagaatagtttgttttttagaaaagtctgaccagaggcattacattttaagaacagggttggtttcagtactccatgcttttgataagtcatatattccagccatgtatctgcccattatacactaaacttttcttccccaggatgtgggcccactaatagttgccactagatctaaaaccagacttcaggctaagcaagcttctagaagggagatagaaagtgtagtccatgaggagtgggctatgccctagagagcttaatgagtttgctaattcattcaagtggaagtcaggagactgtttgtgggtgggaatgcattttaagagtgtgggataatggtggaaggaatgtaaaactagatcaggctgagtttatcagtactggtccacggagtgaaattactgaattgaatatggaagctcacacagtttaaaaaggcaacaaaagtttgtttgattggttgtctaaagcatttgttaaaagatggcctactgaggaggtgctggggatgttgaaatctcttggatcgataatgatgatgatgatgatgatgatgatgatgaagggattttaaggctcagggaaacatgttaactctgtaactgttgttctgaaaataccttttggttaatggcatttagcctttatagaaatagaactggtccccagtaagctttctaggacaaaccaggcttggtgatgtgcctgatatcctaggcactcaagaagcataggctagattataaagttgagatcagtctgggctatagaatgacttcaaggccaacctgggtaagttagaaagaactttctcaataaataagtaaataaatatttaaaaatgttttctaaaggttggtgatatagatgtgtttacttagcttatgggaaacacatgtttaatacttaatatcactatcaaaaacaacccaaaaaactcaatgccaacctgactggagttcaagcaaggggaagaaaataaagacaaaaattaaatcagttgtctgtctaaatagttcctaaaatctactccaggaacactccccctaaacaatccaatcaataaataggcaaatgaattgaacagaaacttctcaaaagaacaggatggatgtggtggtgtacacctgtaacctgagcacttggcagttggaagcaggatgatcagaagttcaaggctcattttgctacataaagagttcaagaccagtctgggctacaaaagcccctacaagaaacaaacacaaaaagtacaaatggacaaaaatgacatgaaatcctatctaatgtttagccaccaatgagaggcaaatcaaaactgcaatgaaattctacctcaggccagtcgggttgactatcttcaagaaaattaacaataactaatggcagccagtgaagtgtgtcaagaaagaggcagtcttcttgcacactgctggtgggtatatgaattagtgcaagcactatggagatcggaacgagggtgcctcaaagcactgaaatggaactgtcatagaatccagttataggtgtatacctgggacagtccacctcagcagtacatgcacacctgtactgtctatgaaacaatattttggaaaatgaagacttaataattactgtaaagaagaatatccaaaaaaaattaggaggcaatcacttgaatgctgattgtatatttggttgaataaatgattattaattcttaaagtgtaataatgaggttctggttctcctttctttttcttgactgtcacatgcagaaatatttacaaatgaagtcacttaatatatgagttctgcttcaaaacaatggagagccacatatcttggagtacattgctgcaatacctaagatggaacattgtgtggtacctactcaagggtgcgctttcttttttcaaggacatgttcatgtttcaagacttctttcctaatggtggcaatctgagggctattttgatgggaggaacgtacttagacaaatatccccagagttagagtaagacagctggcccacgaagatgctaagaactcagaagatgaacaccagtcagcactagctcagggccccctccataccaccagcacttgctggttggcacactgacccagcagcagagctgatgaatctcactcatgcacacacctcatttccctgaacagcacttgcagggatcccagcattgcaagccagctgtgtaaagatcttgtttaacaagttatgacaaggagttgcagggctcctctgcagtacagtgagctccagggacttagagactcaatggagcagaggacatgggtctggattaacctatgactcatcactctgtagttggtggggtttaaataagctactttggttcttcttccttccttttcgtttttccttttctgtttcctcatctattaaattagaataataacagtaatggtaccctcccaataaagcagttgtgactattaaatcagatattgtaatgtccttggggactgtttaataactatcatcatcattaccatcagctcatttctctggctgttggctttgcaggcacagttccctttctgagtcactcaaactcaagtcctccgactgcttgctttctaacaaagaaagggaaacagactacaactgaatgggaatctaaagtttccagacaatcacgacatactgttttccaagaagtcaagcaccttaaaattcccataatataatgagctcttcagaacactgggggatttccttcattttaggatccagagattatgacttaatgtcctcttacattgtggggtgacagttgatttgtattaaattaaaggaaattccacttggattgaaactttgaagaatactattctcttggtcacaagttagaacaattggatttctcagaaggaacctccaagcaaacatgttacccgatgcacatgggggaatggctgggttgatttgcttcagggatttcatttggtattgtatatataaatttttcatatcattggaatcaaattattaatccattaaaaagactgttataactatgttaggaaatatcttccttcaaaaaaaaaaaaacaacccgtttttgtttgttcaaatgagaagagcagatgatactacctcaatatagtttatttaaacattggtgtattgtgtgtgtgtgtgtgtgtgtgtgtgtgtgtgtgtgtgtgtgtgtgtgtgtgtgtgtctcgtgtgtagtgcccttggagactagaagaggacttggattcttggagctggagttacagatgattgtgagctgcctaacttgggtgctgggaggtgaacccaggtcctctgaaagaccagcaagcactcctaactgctgagctatctctccagtcccaacatttaaagttatattaacatgtttactgacttcaatcatcacctcagaaaaaaagaaaaacagagagagattctgcaaagaagaattgagactccaaaacattcccttcaaggaacaccttattttcatgactttcagttctctctcagaagtcctttaagaactcaatcacccagatggtttggagaggctaaggaggaagaatggatatattttcaaagttcatattgttagacccccgaaaactcaagtatccgaggtctcaggccaggttcgaggtcaccccaatcaccaggcggattcgagagcttgctgcaaactgcacaaggctttattgtaatttaacgagctaaccccatgttagctcgggtctttcacccacccgccatggcggacggctagaaaagacggctccttgggtctcccaaaagatcttatagggcagtgtaaggggagtgtctaggggtacgcacaggcttacgcacaggctcacgattggtgtgcttccaggcttggagggcttgccctgtgttgattggtcaactggttgttatggcccataggccctcccagggtggttgctatgctcttacgtcattgtcgtgcgcttgtccttaaagcacacccagggtcgtaaagcatagcgccaccagctaacttctaattggttccttgccacgagacaggcatctgacctctaagtgaccaaggcagttttatggcaagcacgtgttcagctgttatggctgccaaaagggaagccggttccttcaatatacttccaacatgtgttattgtcactatgacttctttggcttgaaagaaaatctaccatatatattcaggaaaattaaacagtggaagtatatcccgatttcatcctgtgaatagctgtggagaaagactgtggtctggactgaagcttctgtagactagtttctattgggaatattatttaacttttaccaggttttggttttatcatttgtaagagtttactgtgaagatgtcagagtgaaccctacttctttgtaggttaataaaaacaaagcaaaacaaccgttgatctgcaatagcagattcaagaattgacaggtaaacagtttggaaatgttagcatagcacatgctaaacattagccgatattgttatccctcgccaacaaacagttgtcaggtgactaatggagtttaagaaagtgacttcacctggtaggatgtttggaaatggagattaaatcctttaggctctcttctttgccctctgagagtcaaccctcttctacactgacagctggctatgaaacagttctgtgatctctctctttggaatactgtgattttaattcattaggttgttttataacctcagctatatgagggcctgaaaaggtatttgttttgtagcctctaccacttcctctggctttcagtatgggagcagcatcctgttaagtgatcactcagcaggcaatcgggcaaggacttctttatttagatacaccagccaagcacaggccaaagtgaggagcagggagccggggccagggccagaagaaggggaagagagggtccatgtgtccgtggtcccttaagaagccttcctgacatcaccttagacttcccctcaccccgccctcacgggcgtgttcctgcacacctgtccgggttacctggagacagagctacagtgtctccctacaattccccttgtagtctaaaagaggattaaaaattaatagtgtaaaacatctaaaatgaacaatcataaaggtgaaatataagaagatatagtaatctgctattgcacatcctaactatgtcttttccagctaagccctaaagtcatgtggaaagggtgtctaacttgaatacctccttccaatcccaactctaaacaataagaaagttatatctaactaggctttcactaccctaataaacaataatggggaaacaataatgggcatagcatcttctaagttacttcctgctgaaatgagacaatggtagccatgtggggtcctgtgggaaaaaaaatgctagtacagggaaagtctctattgggttatctccagtccatgttagatgggatttgcttgattgaagatctaggttgaaatcctcaacttgattgaagtcaatactcgaggctctggtcggagtgtcagttgaaacagagtgagttgaatccagtgcagtcggtgaggtgtggtccaattctttttctggggcatgcagggattgtcgtcaggctggtcctcattggctgtatgggactcaaacataagtatcatcagagaaatgtttgcttgcacatgtatgtgtactgggaaaggcaatccttgaaaaacgacaattatgagagggtgtaggccttgaaagaaagagccaagaaaagacaaagatagtcctctggttcttcatttattctgtaatagcaattggcttcttgatataacacagaaactttaaaattttgttaaataacatgcttggattttaggggaggaaagccaaatccagccctaaatccagcatcgatttaattgaatagggactaggaaatgaagagaaatagagttatttgagagacagctgcaaagtttaccgtatagcacgttccttttgtttgatgtttatagctactttctttccttaagtatctattcatgtagtgtcctttgactttcggaggtggattttcctgtgaggataaaaacaaagcacttcccatcctttgggaggcttgtatttagttcatgagatatacctcagtaaatacctatcagttgtccttattgagagggttgtctttttcaactcaaatcttgatcaattttgatggtatctaaagattttcttctcctgtggaaacaaatgcaaaacccctaccccaacgtaacatatgtctgggtttccataccaaggtcagtacatctttgaagtacactggttgattcagttcagcagttttttccgtagtctagggcctttcagcagctgtttgtccttcgtcattagcattaagaaagtttagtgtcaataaagcattatgtaacctatgtttggggggttttgacttaccagcttgcctatggaacatctccttaagtgtcctgttagacctctcaacaactgcttgtcctgtaggattgtgtggtatacctgtgacatgcttaatgttataatatttgaagaactattccatttttgtggagacatatgctggagcattgtcaatttttatctgtgccggtatgcccataactgccatcacctctagtagatgtgtaataaccgaatcagctttttcagagttgagagcagtagcccattggaaacctgagaatgtgtcaatggtatgatgtacatatttcaaatttccaaattctgtaaagtgaaagacatccatttgccagatctaattcctccgaatgcctttaggtttacagcctgctggcagcggagtttgcttataaaaggagcaagtatggctagctcggtcggtagggcattagactcttaatctcagggtcgtgggtttgagccccatgttgggtgccacgtgttaagtgatcactcagcaggcaatcgggcaaggacttctttatttagatataccagccaagcacaggccaaagcgaggagcagggagccgggaccagggccagaagaaggggaagagagggtccacgtgtctctggtcccttaagaagccttcctgacatcaccttagacttcccctcaccccgccctcatgggtgtgttctggcacatctgtccgggttacctggaggcggagctacagtgtctctttacagcatccttcatgggatttggttcctatcagcaaggagtcacctcttctctcttggacatccctgagagtggcttctttgaccagtgctgagaggcagacaaaggcctgggacagttaaactggacacccaccacctagccatgtgactcgccctgagaaatgagcatctttaaagagatacctcttaaaggctcctttgcagctttttcactgttcactgtaaggcttttggtctgaaaccatgtttcctaatgtgtctcaaatctgggagtgccaagtggtgctgaaatggacatagccaagaaaaagatgggtcctgcctgccttatttgtagaaggacagtgtgtttttctgttctcatcgtcccccttttgtttctttgtgattaaacaaagaagaaatctagtcaggaagctttcatgtgctttgaaatgacaagtacatagattggctttcccaggcttacccagtgtgaatagcgagtagacacagtttattttctcactgtataagtcgtcctacgctgtaacaaaaggtgaatgagtgtacattcccacagcctcttgatggatggcatagttactgtctctaaggaaattttctaatcagtttagcccttaagattgctagtggtctctcttgatgttaaatgtcagggagttaattacgctattttattactctgttagaacgatattatataatcttagccacatacattccctttatccctttgaccccccttattctcctgagtggaacatttagattaaaaataaataacttaactggtaaatatgccaccacttgttattaatcctccatttcaggcctgaaaagaggaatgtcatatattcctgaaattaggagtgaggttatccagagtataagtaggggttcaaagtgacttgtgtctgatggtgcattattgtcagttcctggctcaaggtgagagctgatgatcctgacctatcacaagaatgtaatttttctcacagatgtggaaaaacttatactcattcaaacagattaagtagatgataaaagtatttatggccaacctagagtcagagagaaaagacagtggggtctgatagtagatgaatggcagttatgttcattttcttccaagcttttctagaaatccattcccatctgatccattgaacatcaaaaaataaagagatcttagctaatggcattagaaagaccagcattttgtgtgtttatgtctaacagtctaaagttattgacttaaggctagggttttttgtttgtttgttttgccaatcacataacagcagcagtattgcaagaataggggaggagacttagttttatggtagaagcagctagaaaaataagtctgtacttatatcaatggctgagaaataatcctaaagccaaaataagagggagagaaaatccttttagttttgcagcaaggcatctcctcactgtgagtactctctgccctgcataacaagtgtcaaactgcaatgcaatatgtacccacccaactccccaacctggaggtctcacaagagcagtagcttagtgttttatcattgcatggttcctctgtgatgtctttaaggatctggaatgccttagtgttactgctgttggcatggtggtgtataacctgccagcctctaggtaaggagcaatgagagctaaacctggcgtagaatgagaaacccatcaggggaatagagcttggctaagtcctgggctacagctattagtctcaggctagtggtccaggcctgctggtcatttttccctgagttggaaatggatccatagatgctggaacagcactgaaaaaaaaagtcccagaaaagctgctcaagctctaactgtcatttaatggtttgttatgtctagatacataggcaccttattttcccagttggctcatacacagccctggcatgtgattagagtgggcagaggattaatgccctttttaacaacaccagtcagacacataaggccaagagataatctctttttagagggtgctatcaatctgagtgtgatgtgtggctggctttcctgttggaggataagcttcaggaaaagccttccacccagctccctgcctcctttacagaggatttggaccaaagaacatcaagaagccaaagaatcccagtgcctcctctcaggctgtgagactttaagtatagaaacataagggcaggaccaaaggtgggaccagttatgcctgctactctatgccagcacctaacgtccatcctacatgcagtcagttcttgcggttaactcatgaagccttcattatctgggataattgtatcagggagtatacatatttaaagaatcaattttaagagtattgataagcgtgttagtaaatctccacccagacaattctattatttatactacctgtcttcagagtttccctgagaatgttaaagagagccatcagtgaaaaagttgtatgggaaggcggttttttttttttttttttttttttttttttttttaatcagaggatcaatcaatctttagttttgctagaatgtcaaaagcagtactcaagtctaactaatccctagaaacatctggagaaaaaatttttaagcagattccttgtaactcttagatatttctaattaattggtttagggtagatcctaggaatcttacctttagtaaattccatagtaatttgttctgttgctcagttttaggacctactaggccaacggtatttaaaaacagacagttgatgttaaaaattaagtctatttagtcaccctatacctttgacatactatcaggcattaggcactggacatccactgtttacaaacaaatgcagctatagactgtgatcaattcaattggagtgggtgtgcatgagatacgatgagggaaagctatcaggacatagctacagactgtgataaatgctattgaagggagtgtgtgtgagaactgatgtggataagctagtggcaacattatacttaaaacaaaaacttggagaaagtttgaaaagatgcaataagcgtgagctgtcacaggccaaagagagaaggtggaagaatatacttctgaaagtcgtggcaaatggatgtctttcactttacagaatttggaaatttgaaatatgtatatcataccgttgacacattctcattaacattatgggtttcttccttctagtttttcttcttcctctttagagaatgcggcttctggtctacctggcatggaccacatggtgaccattgctgcttgaaaaagtcccagcatgtcgacattgcagaccacacttctccagcacctttttacttctattttaatgcctttccttttgggaaattttgtatgggctttagtaaaatattaaaatatgtacaatgggtagcttctttaaacaaaataattctttggaaaaaaacttcctaccacctcagaaccaggaattccattgtgccttcctaattacaccaagaacaggaatgttagagatttactagtcatacctgatcccaaggatgagatgcctacaattcagatccagagccttaggccacaaaggacaagagttcagttaataaatacaaagatggcagagtggtctggtatcatgagaacagagtaagacatcaggacctttccttccgggagcattatgagggaaacaggcccatagagtaagactaagacattgtagtatggaatctgctccccagaataagccaatccttttagaacttcatagagaagggtctccattccctgggtggcatgaggagagttcctgcttgacaaagcactcaattttcttatctctagcaagaggaacttatggcccttatgttaacatatgaatggtgcctattgtcaaggtcaaggctagcttcctcaaccctagatctcaagccacattccatctcaggagtctctggtctccagcttagtcctatttgcaactatacagtataaagggtataatcttttctcaataaaaggttactggtgccgggtggtggtggtgcatgcctttaatcccagcactcaggaggcagaggcaggtggatctctgtgagttcgagaccagcccggtctacaagagccaagacagcctccaaagctacacagagaaaccctgtctcaaaaaaacaaaaataaataaataaataaataaataaataaatggttgctggcagccatcctgactcacctcctcagatgtgtccctctcctccttctccccccacctgtaccaaccacacatcttctttgggacctgaaccccccaatgaagcaggtctctgtcatctacttatcctctctgggtctctcccttgcctagcttgctcctgctttgagctcagatgagacagtcttttaagagtcctaagaactagtcaacacatccttatgtatcaaatcctatatttcttcagtctttcctttcttttcatgtagccttctgtcagaaatgatgggattctcagctgaaggcagtgcatttacagccatagaaaaccaatctttggtttgggtcacaccttatttctatctttgttaattccctgacatcactgaacttaatcagaagcccattttctacttaaaacattaggtatactgctatgcccaaattgaagagtacccccaaaaacaacaaggagaccgaatcccatagtaaaagcaaagagcctttattcaagtttgaactcagattctctgtgtctaatgcattggcatgatcagagagcctcaatcttgtagcagaggacatgtcatatataacatagtatcccaatactgagcacagagagcggcttatgaacattcttaactttattctttaatttttaaactttttattattttaaatgtgtgtgtgtgtgtgtgtgtgtgtgtgtgtgtgtgtgtgtgtgtgtgtgtgagattatgtacatatgagtgccagtacgtatggaggccagacacaagggatcctcctgtagccagagttacaggcagttatgaactgcgtgtcctgagtattgggaatgaaactgagcatctctccattgtgtgggtctttgcttgttttcttacagggtctcactatgaagcccagtcttgacttggatttgccatctttttgcctcagcctcttgaatcatgggattaattacaggtgtgcacactacactcagcaattattcattccattttagaatgtgtagatgctggggaatgtgggtatttcctgtgcatgttattatataataatgaggtacattgattacaatgtactgaagctttaaatgaagacactcagttgatgccttcatgaattcttatctggatcctctaatgtcatgaagaattgaaattaagagcaagtactctatcatacacctcacaggactcagttccccaccaagtctggatcctggagaatgatctctttttactacgatggttaatcttgactgtcaacttgattgtctctgttgtcatctaaggtcagccttcttggctttgggagaacatttccaggaggggttaactgggaggagatggccctccaccagagtaggagctagtaccctctcctagcagtccagctaggggagtgaggggaaagcaaagtcacctgcttgcctacatttgctccctgctagtgagcatgcctgtcctattattgttgctgttcctcctgttgctgccaccctttactggcatttgaacccagtttctttggcctttcagggtagattgaagactggtaattcctcaagaacccttcaggccttcagcaccacattggaactactgaggtatctagtcacgtgtattgaccagttacagggttctcagcttctccagcatggggatggctattgttggactacttggattctatggagttagtttaataaatcccatttgtagcatatatattttctatcagttctgttcttctagagaactctgacaatgtatcttcctccataattatttagcacactcctggaactgagtatggggtcaataaaaatctgtggaaggccttgcatgaatgtgtaacagaatgtactggttcagtgacataatcacgaggcagaaagcaacctactcatagttccacatttttcttggagttgtatcctaaagcgtccatcatcattagggtactctaagtgtcttggcttagatcgttaaatccagcagtaaaagcggattgaacttatgtattgatgtggatgagttattctcctcatgtgggcttttggcttgaaaggttccttcccatttcagtgattttaggctgaattggccaacgacaccaacatcagatcttccacatcatacttcaaacacaacaaattgctagaactcctgggagatcatttctaaagcaaagccagaaaagtcttgtctgtagtggggcctgctgggatgtggctagagtgataatgaaagcccttgatacccccaccacccaagtgcctccccatggcttcagggaacccacagttctcagtacatcttgcaggcagtaaataccaagaagggaacctagagagagtggcacatttgctggtacacactggcaggtgttagttcggattatgtatggaagatcctgggtgttaaaatcctacacttgactgggagagtgggtaacaacaggagctaacagcagggtcatgactagggggcagaacttaagaattgagacgaagagagtgagaggaaagagagagagaagaaaatgaatgtgtcgtgtgtggggaagtcactgtaatgttaaatggttaatgaaaccataggaaccagaatattacatttatatatgccttttaactccatgcctttgttgttgttaaaagtcttaatgtgaggaaaggcagaagcatactaaatatttgagtttcagttacctcaacagccctcccaaattagaacgacatcaaccttttgagggtagggacttgcttctgtcaccctagtgtttcagatagtgcccagtacctagtaggtcttggatatatgcttatgatcagagtgggtctctatcaagcattttaagatgaattaatatgaggtattcacaaactgtcctaaacaccaaagaacatttccaaacccattctttgaggtcagtatctctgtgatgacaatccaaaaacatcaaaagaaagtgaaattgcagacaactatgagtatagacataagaattttcaatacaatgctagaaaaccagcgcacacaaagtgttatgcacacagtgaaagggcttatcctagggaggtagatttggtttaacatttgcaatcaacttagtgcaattcactgtatcaacagaagaagaagaaaaaaaaccttatcatctccatagagaaagcatttgacaaaattcaacatcttttcacgattgaaaatagagcaatgaaaggattgagaaaactttctcatctcagtaaagggcaattaaaaaacctcaccactatttgggggagatgcggcagcaggaaacaaaatcaaaggcacccagatgagggaggaagagttttgtaaaactgtctttattcgtggatgacctgatcatgcatatggaaagttcttaagaaattcactaaaaatcattaggatgtatcgatgagtttagcaaaatttcagaatctaagccagtaagtaaagattaaatgtattttcagatacttacaataaacaatatagcaatgaaattgggaaaatacatgtacatggcatcaaagagaataatgtatggggatagtgcaaagtttgtactatagacacaacaaaacactgtttaagtaaattaaagaacagctccataaatttaaaggtatttcacttatagggactgggatagtgccaagatggcaggactcctcaaaatgacctccagcttaacatgatttctgttcaggtctcaactggtgtccttaaagaaattattcacttgattctacagttcataataccattacgggggacattggagcgcattatttgcagtacctgaaacaggtagaatatggagacaaatcaaatgtccatcagtagatgagtaaataaacaaacatggtatacacatacaaagaaatagttgaccaaaagcgtgcatgaaaattactcacaaattaaagaatgaatgatcttgaaaatagtatgctagtggtggacagttatgaaggaccacacattatcattctctatgaaatgttcagaatccacaaatctagatggacagaatgtagactagtgtttgcccatggatgagaacagtgtggggagatacagttggaggctgacagctggagttcaggttttcttttggggttatgaaaatcttctaaaagtgattgtggagatgatgactgtacaactttgtgaatatattgaaaaccctttaattcctttgtgaacattattttaaatgggtgaatggcatggtatgttaattatattttaacaagcaattgcccaaaacggaaacaaaacaaaagaatgttaatgagttcatttaaagattttagtgtagcctattatatatgaaaacattcttaagcaatatctttcaagttctaaaataaatttacaaaagctatagaagcaacaaaattttcatctgcattagaaaataatccaagctgggtgtgatggtgtacaccagtaatccaacacttaggagggtgaaacaggaaaatcctgagttaagtagctcccgtcaaaggggggaaaccccatctccccattttattacagttggtttagatttattttgaaaccctgtccagtttccacattctgtgggatgatgcttttacaagccacttcttatcaccctatgtttgggcagtaaactaactgacattgtgtgtttaaatgcacttccaactgctggttggaattgggtgaaactgtggcaatcccctcagttcacacaaagctaagctccctcgtggcttagcacatgtgacacaatgacatttagcgacaatatctgaacagcaatgttgatgctatgaatatttccctagattattcttagtacgaagtgagcttatcaaaacctctttcccatttggttcgctctcagcatctcatgaacacgatgcttaccctggcagctccctctgctcttgtctgtactcactcttctgtctgtccctaaacttgccagccctgtgctgatggcagctgtggtttctatgtcatgtcatcttctatgtccccattctactcatcagcctaacattctgtcgttttcaggggaaaccagatcataagcacagagttcacattaacaggcaaaggaagggaagaagctgtgtgctgttgctactggtcacagcacccaacatacttaaaaaccagaagtgacaagttaggactggaggtgttattggaccttgtctgagagaaaatggatctcattttgcacattctggaatcttttacctactgcggcctcctgagcatcatttggttgtcggtcttcatcatctacttgatttgaagcagaatctttggctgagtacaccagcctagctggcctataagcccttgaggattctcctgcctcagtttcccctctcacttaggcatgcttatgtactgtcacatgtgcctttaatctttaggtagcttctagaggatttaacactggtcctccctcctgttttcacagcaaacacttaatccactgtgtcttctccccatccccagagaactgctgggaagctaaattgtttctgtactcggtgactggcattgttttaaacctcagaaaccatgacttctccatttccattagtcccctgtgatgtattgaccctcagatccccaaggtctatagaatacaaaggactgtaaagatctaaaagaatctgaaatgagctcagtctttaacacaaaaacctcaagaatgattctttaaaaacccaccccaaaccaggctgaaaggggttaagacatcatcaattccgccagcattctgattgcttttcaagttatttgccagtcaatagtatatattgagtggttgtcctctgtgtatcaggcaccaaattagcttgcaaatttcgcattctgcaaagagaactctctcatcccttggccaagacaggtatatctttctctgcaaatgaactccttctgggagttttgcagcattctggatgcctctgtgtaagagttgaagagattggtactctaatctcatataaatagaaaaggcaagctgctctttctcttccccctaacccaccccaccaccattcattttcttctaggttgaaagctgaagtacaaatttgaaatgcacattgggacagcctaggcaaactttggccgtttttctgggtgagaaatgactctcctatctgacacctacctcttctgccttctaagggtgatctttctacattggagcctttctttgagaaaggttgaccctaggggtcctgcacagatgtgtgggaacctgtcaccaggttgaattaataaagctgtcaccatcttgtttgaattaataaagcttatttggtagtcagagaatggagcttaccacttgtaacagcaagcctttcctccaagctgcctgagccctgtaaccacgtgggtgctttctgccagaccacctgagttctgcccttcaccacgttaaggtcccaagtaacacacagagacttatattagctacaaatgctgcttggccaatgactaggatttttcatctgctagctcagtcttaattatcataaatctatatattttataagacttatctcatggaggatgcctttctctggcattctcatcctgggatcacatggcagctcagagcagagagcagagagcaggaggaagagcgaaagtgacttccttcttgcccttgcttatatacgagtctccctgatatgtcattttctgcctggatctctttactacatttcccagaatcctcctagattcctagtcctgcctaacttgctgcctcattggccaaacagtactttattcaacaatcaataagatgaacatacacagagaaggacattccccatcatctcctcttttctgtttaaataaaaagaagggtaacttaccttttataataactgaagaaaactataaccataactatctgtcttcaactccatcaaagaccacagaaggataataaaaactctagaattaacagagacatctagctacctggacagtcacccaaagttcctctgtaactttggggcatccatcttcagtccataggccacagtgtgtctggaacacttctccatttcagcaggaacccttcaggactgtacatcttgttttgtgagttcagcagtcactttcttgtgggtcctgcatgtccagtttatacagcaacaaacagtccaggcaagagcagtttcttgcccaaatggctaatcttgccatgttgaaggcaaagtctgtattgagtttctttgatgcccatctttctttctgaggtaattggtgtgccaggagcagttgtgtctcactgtcaagaaaaaccctaaaccattaaaatgccatatattatataggcctttgaaaggtttgaaggatatctatccatctcaaatacatctctgtatatctagaaaatctaactaacctaactgtaggttgtgactattataggtgactatataatctgtatttacttatgcatatcacaaaattgaccttaaatttgtatcaataaatgaaaatccataccaatgtaaaatattcatctccatatcctattccccctttttccttttaaaaagagattgactgtgatcattaccatttataactaaccccatttaaatgaaaacaaacataagaaatatttggaaatttgggtgtcattcattccaaactgcttcctgctggttgggggtgatgtccataccatggagatccatgataaaatgcagaaatctggctgtagtcatctatgactgcctcatctcagctgttttggatgtaggatcagttgggccactgcttcagggggtcttgcttgatcatattagtctggaaggaatccacagctttccattttctgtagagacacaagcaagttaggcaggactaggagtctaggaggattctgggaaatgtagtaaagagatccaggcaggaagtgacatatcagggagactcatataaggatgttgttccttttgctcttcctcctgctctctgctctctgctctgagctgccatgtggtcccaggatgaggataccaatggaaggcatcatccatgagataagtcttataaaatatatagatttatgataattaagactgagctagcagatgagaaatcctagtcattggccaagcagcatttgtagctaatataagtctctgtgtgttacttgggaccttaacgtggtgaagggcggaacttgcgtggtctggcagaaagcacccacatggcagcagggctcacgtgacttcggtggaaagacttattgttacagccactagctaaccatagagacctggaggtctgtacagacagacagggagtgagatagctggacagaaacaggatataatcagggagaaacaggaaatggctctcttgtctgctgagatgattaggaggtaaggtgtgctgtggcttgctccttctctttggtctctcagtgtttccctctatacctgactccggctttttattatctggaccaattaaaaactctgtttacaaaaaaaaaaccaaaaccaaacaaacaaaaaaaccaaaacaactctgtttacaggaacccctgtttggaatgctagtttcgttctccaagttgaaatgccagataaggtctcatcaaccactggatcaaaagcatttggctcaagcactcattgagaaaataacttttttaaaaacaggcaaagaatcaatgcttcccttttgagttctttttaccctcttttttttcttcccccttccaaacaattttcgggctatttttgattttgttagatccagtaataaaacagttgagggaaaggaaaagaacagggactcttgcttagtcagatgcagatgaaatactctggggagtatgacttaaaacaaatggcaaagtttatttaaaatgtttgccgtctacactgtacttagaagggtaatgaagggtaagaacatatagcaagatgaattttataaaaaatatctgtgtggacattttgcctgcatgtatttctgtgcactgtaagtgtgcctggtgcctttgaaggctgaaagagagcatcctgcctgagcacccttgggcacactgcctgggttatttctccctgggagcctcccagcccccccctcaggtactatattcaactcctccatatctcactgtctacttggccaatggtgccctgaggtaaatgcacttactgacatggaattctgagtaaagaagtctcccctagagctcttctgtgcaagtctactcatatcatttcttcgtcaaaagagaagggaaagtcttatctgcaatggaagacagactgccctgttagacaggctcacactgtggccttgatatcaagttcagtcattccttgagaattcctgccttaacaaggtcagactctccatatgtaaactctaatccaagggaggggctcacagatgtcccaaggtcccatttttctagcatcaccatgtattttgagcttcattggatatgcatctcataaagcatgacactgaatcttctgatatgaaaaagtaggtgctgtagaaaatacatagctggggaaataaaaggaaaaggaaaaaaaaaaacttccttgggaaaatatcagatgttagatcttaaggacctatgcttctgaggctgccagagcatctgaggaaaattagacagtggtcttagccaaagacaaggagtggaactctatcactgagctgagctctcccattgacaacacaaagatcaagtccctggaagagatctgtctccctgttctccttggcaattaaggaatctaagatgactgactctttctcctgggagcagccctaaatggtaatgttctaaggatgatgctagtacaagagcagacttgagatggccagcagaccatgttcaatgctttggcacttctggggactacaagggtcatgttggcttgaatattaagtgctccaagcaggcagccactgctgtctgagggcccatcctcttagccaagctttccatagtcgcaaatcagaatggttactggggggaacaagattggcaagtctcacaatgtcccatgtaaggtgaccggccatggtggctttgtgtagatgagcactggtatcatctttgctcctgtgctcatgaagctgctgctgctggcccatgttattgatatctatatatcaggtatacttctaccctgggcaactttaccaatggcacctctggtgctatctacaagacctactgataaatgacagttgacctctaaagagagaatgctttcaccaagtctccttatcaggaattcgctaaccatttttgtagaaacctatatcagagagtctccattcagaggcctcaaactctagctaaggctactacgtatgatttttatttcaaaaaataaagtgaattaaaccagggcaggggggggggaagaaatggctatcagcagtgtctttgggtaacatgaagattctttaagaaaaaatatttcattttaaaaatacaaagcactcttatttctggcagggtaactaagtgtgttgctaagaatcagaatctgcccagaccagattaaccattgaaggggccacaaggaacatactacccacagggcatatcacagtcactgtcccatagcaaatgcagtcaaggcagggactctccagtttgattatcttgtgtctggggtagtatgggggaagagataatgggatatggtcttcaggtcctggagggttactaagtcactagttattttagttattcagaatcatgtatcttatatatactgtccatatacaagcagttcttttcctcttctggaatattctgtccgctccatgttcagacactataggctaagatgttaaatacttggtgtataacctaccactgccttagtaatggattagctccagccaaacagggggctgtgatcttgcagctggagatgatggtttatttctttctccatagcaacgctagtgtaacaggatggccgtgctttgatcaatattcacatagcctcagcaactggggtttgtgattagatgcagtaagtaaggaactgatggccaatacagcacttggaaagtgttctgggaagcattatgccctgttagtcagaagcttcctagaagtgctcttattgatctacaatggaggacggattatcatggtgctgatttagagaaaggttacagtaggctttccgggtcatgccctgtttaccttgagggagcactttctatcaccgtatacctcttataccagaggtggcttcctttcatccctgaacaagaacccttcagaaacttagaggctctaagctctcttgtgatagctcctcatcaatgctgtgggccatgcccagcctgggcaggggtaactgccaagattagcagcctctagcaaaaccaggctctgagtcctattactgtgatggtggtaccaaaggcagaggctatgcatctgagagaagactagccttgaccttcatatcacgcagagagccttagaggggggctgaccagtacttgggacttgtagaagcattttgcctctggttataactggggagtacaagatgctcttcattcacccccaagcacacctgagcatgtctacctctgttgaactcaaataacttatttgtttattctatcagcaaatattactggataatatcaacaggtattatgccggttaattttatatgccaacatgtctggccgtggagggctcagatatctggtctaagcatagtctgggcatgtctatgggggcgtttgaggatgaggcttctatctgaacagatagactgatagactgagagaagatgatgttctcctgatatgggtgggtgggaattctctagtcagtggagaatccacacagaatagaaggctgccagtgggaacactgatgtcttgccttcactctttgatttggactgcaccttataccattggttctcctgggtctgcttgatgtctcagccttcacagtctgtgagccagtttccttgcaataaatctctgtctccttctaacacacacacacacacacacacacacacacacacacacacacacagcggggggtacttacttgttgtgttagtttttacatcattatgataaatatcttatgtaacttagagaaggaagggagctttatttggactctgtttcaaaagctttacttcatcacactgaggagggtgtggtggaacaaaacatctcacacaagggtggcctgaaagcagtgagagacaccatggttaagcataacctttaaaggggcctgctccaagttacctgtttcctacagcaccagtcagacctctgctatggcttccccaaacagcatcattggtaggtactgagtgttgggaggcttctggcatttaaatcatcacactagctgaacatctctaatctgaaaaatctagtatctgagacttttaactattgtgttactgatcacacagatgagattagcaatacttgatttgcatacatgtgtgcattgtttcttttgaatgactctgactagaacagataacatggtgatgagaaacacagggtccctgctctcactgatcaccatctttctttccttctgcgtggaagagataaacaagggaacaaggtgagtatcaagtaatgatgagtcgtcagcagagaactgaagcaagagagttcaaaactaagtggctcccgagtccttttgattgggtggtcaggaaaagtccttctgaaaatgtgacatttgaactgaaacctgagtgatagagaacagccccagagaagatgggggggggaggatggcagggggaagcattttcccagagtgagaagagtaagtgcaaaggcctctgggaaggaccagttgcacaaggggtaaagggtgggaaatgaggtcagagatctttcagagcctgtgcaaagcagggttgtgtgaactgcaagccagagagactctgaattttattataatgacaatgaaaggcctttgacagccaggattcctggtagtcataggatctgacttgaatttttttcatggttttaaaatgaattattccttggaaatttaatacatgtatataatacattctggcagtaccccttcctccaccgtctcttatccctatctttccattcctcctacaaagtcccagccctatcttgtaagtagacttttcttttctaactaccagttcccaaataaccaatacagagacttaatattaattataaatgctcagctgatagctcaggcttattactaaccagctcttatatcttaaattacccatttctattaatgtatgtgctgctgcatggcttgtggcttacctgcctgccagcatgttttgctccctctgcatctcctggcaactcttctgactccacccttcttcctagagtccttagtctgggtttcttgcctaactttatcctgtccagctattggccagtcagcttcttcattaaaccaatcacagcgtaatttgcacagtttatacaaggattaattattccacagcactaccttcatgtctgtctttattttgtttctggttttgctttgcgacccactggatttatccagggtgtgatgctgtccactagagtatgagtgattcaccagtagctacatcatttgaaggcaatgatatcttctcctcctgacttgaatattaaaaaaaaaatcactggagctgtttcatataggacattcaaaaggaggtgggttccattatccaccattttctactccttccaaaatatcccactaaaatgattataaaaagttaagtaaaaggataaatctcttatgcacaataagaatttacatggcaaccacattagtttggaagttgaacaaatgggtgagattgaacttgtcatttgtgagaaagtatttgccttgtcaggcaaagatggccacatgtgaactttggggacatatattaaatacaaagcataactgtctgtttgtctgtccatccatatatctactggttaccacagaggaagtaaaatccagaagttagtttacctccaactgtcaacaaccaagctcctggtcaccctctgttgcctgtagaggaacaagtgtaggcaaggggaggagaacagacaatagacaccatgggacatcttcctttaggactctaggtgtggcctgaggctaactatgacagacatgatatcaagaattcttggctcccactgtcatgggaaaatatgagaatggaagggaattcttctagctattcttcatgggtgctctcaaaggtccaaagagaagagagaagcagaactggccaccatcccagtgtgagatgagatgcccaaggagacatctatttcagatgcctgcttccagaggctccatctcactgttcttggtataggtagaatgttggtactggtcattttattcttgttaaatccagaatcttcatgtagctacttccacctaagtacatttgaaaatgaactcattcccagagtaatttggcttatatttcccagatttcatgtctttcatgacacaagggagatcttactcatttcccccaaattctctgtttcctaaccccatcctgttattcattgtttatgatgttttctgtaaaactttctgtaacaatgtaatctttcccccccgtgcgtaatattgaaaaataatttaggaaattacaagtaagaaaaaaataaagctccccatcattccattgcctaaaaatagtcattgccctgagtgggtggcatccatgttgtactcatggggaccactggagggaacaggtaacatgtccatctacatttgatctcaagtgctagggatttgacagggcccatacttgatgataacttgatagggcttcagttgggtgtctagtatttatgtcaaatgtgtatttaaaagtgtaaaaacaatttttatactagcatagagaggagagatagctttgaaaatccacacgtgaactcctccttcataccctattatgtccttgtaatcctgtggcctccaaacttaccccagccccagcccaagggtagcattcatcttcatacctcctgtagcatgaagtgactattcttgtttccatattcatgcctccaaccttgtttctggaatgttcttccctcctgcaaatatgctgatctatgccccatcattcttttgttttcccatcaggcctcatcttccaactagaagttgatttcatttacttctcggtgcttcacagagtttagcatttccttgtggccagcatgaaatcacagggcatcatagcaactgggccagccttacatcttagcagagggctgggcataggccacatatttcataaaaagaaaagtgcatgttatgctgtttattcagaactatacacaagcagctgggctcctgggtgctgctaaaacctcggaaggacaggggctatagtttctagactttggggcagtgtttttatgttaccattttagagctcagaagtatgaaacataaagctgtcttatttggagtctgtgggtttttcacagtttaattcatacctggggtgaggacaggttaccatcatggttatgaattgagtttgaaatgtttcccacagcctcatgtgtttcaacacttgatcctccagctggtggtgctgttttgggaggctgtgggaccctggaggtaagacctagccagaagaaagggatttctaggagattttagaaggtaatagttatgccctgatctctgtacattccctggtctgtaagctccatggctggccctgccgccctgcttttcctactgtaaaaccccgaacccaaagaaagcccccttctcttaagttgcttcttgttatgtatttggttgcagagatgagaaaagtaattagtgttccttctaagatcttcatgcacctagtaagactagacagctgtggtataaatgtggaaaaggttaaataatgcaattcaacccaagaatagcacagaagaaatgttttattatgttcttacaaaacaacagcttctatgagaagacatttaattaattaattaactctatgtgttttccacatcatgtatcttgattccattcattccccatccctttgcatctactctcctcctctgaagtcccccctcccacaaataaatcaaaattgaagagaaaaaaggaagaaaataaaattttaaaaaaggaagggatttaaaaatctcaccatgcaagctgcagggcaacccaacaagtcactccgcatacttctttgtacatacatctctacttgcaagtgttcagtgcagagtgtcattggtctggttccaggttcctgttgtccactacacgttcaaccctgggcccccaccaggactctccctggatatgcctctactgctccgtgttgtggagatcctgcagctttgggactgcaggtcaggtcccctcatgtgctccagcagatcacagatggggtggatgttgggggatgccaagtcataaccctgggtctgaacttggcagctccgaaaggttggtcagccagatgggaaatggggacagccttcccatggttacaagttaggggctgcctttcctgcacctgtgttaacagtgttgactgtattgtgctgccctggtgaggggcagatcctgctcttccaagtgttacagctggtggggggtcaggaacagctcactctagcagtggcctttgtctggtgctgcaaggtatcgggtgggcctgcattttctctttggagcctgggttgggcagccttagggctgtatgtgagtctttctgtatcactcaggttaccatgatgcaggctgatccatgcttcctcatcacaaggagatcattatagtgcccaactgcctggagccatggtgccagcaggctcctggttggtgtgtttggctgtggagaacagacattttaagacttagcactttagtgtttatctcaagggattaagatactcccaccaaactaccacattggctgcctgataacattgctgtcacagaaattgagagttgaccatcagagagaaagctcacaacacatttttagtttcttctttattagacagtttgcaaataccccacccccccattggtatttaaacctaacagcaacacaatgaaatgtgctagcggggactgagactgctctcctgagtgtttccaattagactccatggatagcatctctcacaggcaccatcctagaagctcatctacttcttggcagtggtttgaatttactggttctaatatgatgattacttgcagtgttctttctttttccataattcttaaaacatttttaccccacaaaaataggcaggttgtccccattgcccagatctcacagtggcaacctgggaagctcattggtgtcttgcagcaataggtggatgtgggaaagggtggccactacctcagcggccatcgggggtgctaggaactgctgggcactgctgatccctggggtggagctgggagatgtgtgatgaagctaacagttcctgaccaatgagcaccaggggaaattaccagagtaaatgtaaccgattctgtcaggggggcttcctggctctccttgtccgtttaaatcaggtaataagctagctatatctgcagaaatgagccaatgtgtaacttattattctgatgtgacatgtctggctgctgaagaaacttctcaaagaccctgtgccagagggatggagctagatggagctggagcccatactgccttgcatgctttctctaagacagaaacctctcctgtcagcctctatcagggcctcagtctgaagggttcaaggcaaagcctggtcctggtggtggggaggtgtgctggggtgagcaggggaaaggagatgcaacagtgtttatgccttgaaggcctcaactggtagaggagaaaggacaggcctacccagttctcataccaagcagaatagagagctgagatggctgagtggtaaaactctccattctctcttgtaattctcttaagacattttaaagttgctttgcttaagcgatacaatatctaaccctgatgtaagaattgctgttgagaccctgctgggtgacctaaggtgcccttggtgttctctgtccacctcgattaggcattcgttcacttccctccttccacctaggcctgtatgcatgcaagtatgcaaactatctgcccattgccagggggcttgtggacatggaccttgatctgagtaaatttccactgtggctgctgtttgaaaataaatggcattctccttgcaagaatgacccactgtcttgtctttatttaaccctcagattccctcaccggaaaccatgagatgctgtaacactggccgttactacaaattgcactcatcaagctcctttgtttgttcatttgcatataacattttataagtagaaacaactttgttatgataaatctttccgccaaaagccacctgagccctatcgccatgtgggcggtctctgccagtcacccgagttctgcccgccacgtggatggacaaaataatacagagacatgttaggtacaatgctgcttggccaatgactaggattctcatctgttagctcagtcttaattatcatacatctatatattttataagacttatcttattggataccttattggtgtccctccttgctggtggctcacatcctgccgctggaggaggaaggggaaaagaaggaacttcctgtttctccttgctcagatgagtctccttgctatgtcacttccggcctggatcaacacttctctactacatttcccagaatcctctttgattcctagtcctgtctgtttcattggccaaacagaactttattaaacaatcaataagataaacatacagagaaatacttccccccatcacaacttgactctggtgaaaactgcacagaggaatcttttaaaggagcattgagggctgctgtagaatccaaatcttagctggaagactgagagcctctatgcaaacatggctttgtgcatctttccccaaaggaattccattagtgtgacctgaactcaaactctctgtgcctagtttccttatctattgtttaggggtaatagctataatggcacacagcacatggcttggttgtgaagatgtgtacaagttgatgtttatacttgcttacaatagtctctggcacacagtatgctctgtagttactgcatcatcatcatcaccagggccaatgttaaggtaagtgtctccttgggatacatcatttgtaagtggtatggaaatgtgatggttagtatttcaacttgacagaatatgggagattagtttctgggtacatctgtggggcattatcttggttgtattaattgtccactgatggtggcaccactctcctggctgggatcctgaacagtataaatggggaaagaaatcttaggcagcagcaggcatccattgttgtttctggctatttacatgatgtgtacagctgcttctgttccctgatgccttgacttcactctcccgatgggctgcaccaggaactgtgagctgcaataaattccttctttcttaagttgcttttgtaagggtgtttcatcatagtgacaggacaaaaactaagacagaaatgattgctaggtacagttgtgacctgtgggggagcggtacccctgttctataaaggaggcagccctgaaggaggttgctactgcagtctctgttcccactattcagatgagacaaggaaggatccattatgccaggttacctgctacgctcaaggtcacattgcatcatcagtgaaatggagagcatagaatgaaatgtaaattttggtgtcttttaaagcccaagcctataaccatctgctgagctccccggtgtccttctgagctattttaaataggtattttcaaaccaaacccatgaagtggcagcttcctctcactggaaggaactataaatgataaatgatagctacaagacaatgagatgctaaaatgcctacttcacagtaagctgaagagagaaaacctgaagtcctctttcctactttcaattaggttacacaggccattaagccaagtaataggagctttttggagtttttggacagagtgtacagtagccatatcttattgttatgcaaacaaaaccggacattcaaggttaaaggcccagagcccaactaaaaactaacctcatcttcaacactagccatgtaggagatgatggaaaaagcttttagacatttgtcttggctttatttttatcacataattatcttgcgtatgctatttgtaatggaattatctaattgatttcttaaaagaaacattgtcagtagtaaggttgtcttggctgtggaagatgtgctaatgatgggctattttaatgatgaaaataattatcgtggtgtaactttgtccttttattttaattatgtgaatgcagcccattcagcctgatgatgtggagttgaatagatttcaggaggctgtgtgcaaaatcctgaaagctctgcaggtccactgattcttttctaattctctacatggccaaggagtgttcctgagcaggaaatggcaacagcagttcacagattgcttacagattttcccttctctgaatattgttcctttcatgataggcaagacactcctcagagaggaccttcccaatcttgctcattatttttgccccagtgcctgttagaaattctatgcttagccactttctctgggtgaattggattccaggaaccttggctttcatggcctctataatcaccagcatatggataacaagctgcattggccagtgtggttttcaatgaggcaggatggaaaagaaatgtgaaggaaaagaagccctttacccaggagtctgcttagagtctctcactagcagagaatcaagtgtgcaggacaattacctcctgcttatgacttttcactctttgcagtcacaaactttgagccttcctggggacttcactggaatcctattcacaaggaaagtttatgtaacaacttgcttgtgcaattctagtgtctcttgattttatactattagattataattttatgttaatctcacttacccggagggggtgggggaagactcttaacaaacttttgaggtatgtgctggctagttttatgtcaacttgacgcagatagaatcatttcaaaagagggagcctcagctgaaaaaaaatgcccctaccagattgacctgtggtgcattttcttaattgatgagtgaagacagaggaccagctctctgatggtggtttcacccctgagtcagtggtcttcagtgttacaaaaaagtagactaggcaagacatgaggagccagccagtaaacagcatcctctatggcctctgcatcagttcctgtccccaggttcctgctctgatttattaggatgataagcagtaagatgaaataaatccctttttctacaacaaaaagaagtcatacccaaaaattagtacatggcaagaaataccaaattattaaactcaggctaaagtcaatgaaatagaaacaaaacaatacaaaaaaaatcaatgaaacaagagttggttctttgagaaaatcaataaggttgacaaatccttagccaaattaagtgaaggcagagagaaagaagatccaaatgaacaaaattagagatgaaatggggtggggacataacaacagccactaagaaaatccaaaaatcaaaggacatactctaaaaacaatactctaccaaattgaaaagtctaaaagaaatggacaattttcttggtacaaaccaattgccgatgttaaatcaagataaacaatttaaacagacctattacttctagtgaaatagaagcagtcattaaaaatctcccaaagaacaataacataaaaaaaagcctaggaccagatagttttagagcagaattttatcagacgttcaaagaagagttaatgtcagcactcctcaaattattctataaactataaacagatggagcattgccaatatgttttactaggacatacttaccttaacatccaaactacataaagacacaatgaagacagaaaatcacagaccaattttctatatggacatggatgcaaaaattctcaataaaacactcacaaactgaatccaagaacacatagaaaagatcacccactatgatcaagcaggcatcatctcagaaaggcagggatggtttgatattcataaaatgataaatgcaacccaccacataaacaaactgaaagacaaaaaccacatgattatctcattagatgcagaaaaagccattgacaaaatctaacactccttcatgataaagtcctggatagagtaaggatacaaggaatatatctcaacataataaaggaagtttacagaaagcccatagccagcatcaacttgaatgcagagaaactcaaagcaatttcactaaaatcagtaacaagacatggttgtccacactctccgtatctattcagtatagtacatggagtcttaaccacagcaggaagacaattgaaggagaacaaagggatacgaattggaaaggaagacatcaaaatatctatatttgcagatgatatgttagtatgcataagtgactctgaggattctacctggaaactgctaagctgataatcacttttagtattgtaaccggatacaaaattaactcacaaaacccagtagctctcctacatacaaatgacaagaagaactgagagggaaatcagaggaaacaatactgtttacaatagcctcaaataatgcaaaatatgctggggtaactttgaccaagcaaatgaaagacttacatgataaaacttttaagacatgaagaagatataagataatggaaaggtctcccatgttcatggatcagtaggattaacatagttaaaaaaaaatactatcttactaaaagctatttacagattcaatataatctccaccaaaattccaaaacaattcttcagagaaattgaatggacaatttttaccttcagagagaaacacacacacacacacacacctcaaggtagctaaaacagtacagaataataataataataataataataataataataataataataactgctggtgatatcaccatcctgatttcaagttgtactacagagctagaataataaaaacaatatggtattggcacaaaacagacaagttgatcaatagaatggaatcaaagacccaagcataaatccacacaccatagtcacccgatttttgataaagaatctagaaacacatgccgtaaaaaaagcatcttccacaaatggtactggtcaaactggatggctgcatgtagaagaatccaaatagctccatacttaatatcctgcagaaatctcaactccaaaggcatcaaagacctcaacataaaagcagatacactgtgaatctgatagaagagaaggtggggaatagccttgaactcattggcataggaaaaggctttctgaacagaacactgttagcacaggaaccaagatcaacaattaatgaatgggatctcgtaaaactgaaaagcctctgcatggctaatgacgctgtcatttggacaaagtggcagcctacagactgggacaatattttttaccaactctacatttggtagagggctaatatgcaaaatacataaagaactaaaaaaacccagatatcaaggaaacaaaaaaaccaattaaaaatgaagtatatatttaaacagaattcttaaaaaaaaaaaagaatctcaaatggccccaaaacactgaaaaaatattcatcatccttagtcatcagggaaatgaaaatcaaaactactctgagatttcaacttatacctgtcagaatgtctaggatcaataaaactggtgacagctcatgctggcaaagatggggggtaaggggaacactcatccatcgctggtgggagtgtaaactttggcagacactatggaaatcgggaagatcggaatcaatctacctcaagatccagctatatcattcttagtcacttgctcagtcatgtaccttgctgcccaattcataatactcagacactgcaaatagccaagatgtcccttaacaaaagaatggataaagaaaacgtggtagatttacacaaagaagtacaactcagtcactaaaaaaatgaaataatgaaatacacaggaaaatggatggaactagaaaaaaatcatcctgagtgaggtaaaccagacccagaaagaaaaatgtggcatgtattcacttataggtggatattagatgtaaagtaaatgatagtcaagctacatagagccatagaggctaattatagagtagaagacttagggagacagatatatctccctagaaaaggtaatagaatagatggctctgatgggactgggaaatagggagacttcagcagaaggatcaagtggagagagggagggaagaggggacaagggagggaatatagaaagagctaaaagtaagggtcatttgagagatagtatggaaatctagtatagcagaagtttcctgaaatatatacatatatgaaggcaatctaaataaaatcaccaaataatggggaaacagagtcccaactggacaccttttgtcaccaaatgaaactgacagtcctgggattgggttacctctaattgaattgttagccaaaggaattctatgggaacccttaaacaatccaggtggttgtcaagactgtagacctctccacagactgacagtgaggcctcgttgctgaagacaagggtctacacaactaactgaacatggaaaaatccagcaggtgccgatatagagccttcatccttacatgttagcatctttggtataggaagttactccacatgctaccaaaggagaagcatataaaccaaccctgccaaaaaccccttggtctacagtagtgtactatctgtaagatatgcctgggcaatggtggcacaaagcttgtgggaataaccaactaatatatggtttgaattaaggcctcctccataagatggaacccatctctaacactgcttaagtaaccaagagcctgagattagatagcacagggacccaatgtaaaaagtaaatactatgtagcaataaaatgacttctagtgacattctgctacgcttatttatcagtactttacttagtcctcatcaatagagcttcctcctgcaacagataggaacaaatacagagacccgcagccgcagccagacattatgcagagagtgaaaaacattggaacactcagcccccaaaggggtgatatttccatcaattcccttctctcagggctcagggaagcccacagcagaagagacagaaatagtgtaggagtcagagggggtggaagacaccaaggaaacaaggccctctaaatcaacaggtttgacacacataggaactcacagagatcatggcagcatgcacagtgcctgcatgggtctgtatcagatggggtcctagtgctgaaagaagaagtggacacatgttcccattcctaacccagaagcaatctctgattgataactacatgcaaatgaaaattcagtattctccaaggactcttactagagacacaaactgctcttaaaggtaggctgcatgcctggtggtggcaacagaaaacaaatcattgtcatcttggagcttccttgatttataaagtcatgtctggggacttttcctttattaatatatatatatatatatgtatatatatgtatatatatatacatatatatacatatatatatatatatatatatttgtatatttcttttacgggtcctttccctctacatcatggcttcccatttagtgtttctatgggattcctgtgtgtgaacaagtaggcctgtgtttcttgtgctttctttggtgctctttttgtaatgtttgtttttccccattttcatgtgttcatctttgttttatcttattagatcatattttatttcatttgttagcccttagaagcttgttggttttctaatgagagaaagaaaaggggtagatccagatgagggggggtggtggttaggatctggcaagagtagagggatgggaaaccataatcaggatatagtactcgaggaaaaaaattctattttcaataaaaggggaaaaacaaaaataaacccccttctcctcaagttgctcttggtcacagtgttttagcacaacaataataatcctaaaccaaagtatgacttgaatgccattaaaatggcatagaagactcatgctaagatgattaattgctaagcttcttgaggaggcttagtcacatttgggtaagcctttttgtgatggttggagaagcctacactcatgcttttaagtgtgcttttttttcttcttcagtatctattttaaaaaatttattacatttgtgtgtgtgtgtgtgtgtgtgtgtgtgtgtgtgtgtgtgtgtgtgtttgtgtgttagcactatgtggcataactctcatgtggaggccagaaaacaactttcaggagtgggttctctcctaccatgtgggctccaagtatggatctcagatcacccgatttggtggcaagtgtctttacccactgagctgtcaaaaaaaaaaaaaaaaaaaccaaacaaaaaccaaacaaacaaaaaacccctctaactcagctttataccggctaagctgtgtgtgtgtttcattgagccatgagtagaggtcctgaaaagattacaacatgtcctcaggatgctaagggtgacagtgtgtaacaccttgaataatcatcagtatttggggggtatataagtggaggttaggaaaattcagttgatttgtccacagatttaaaaagcagggaagtggagtgacagaggttgggatccctggccgatgcctctgagctgtacttggtaccaaggcatccctcctacctcacgttggtctctggttctgctctatgacggtagaggttacagatgcaccactttgttctagcccatgaaccaggaggtgctggtgtgaaaatttggggggaattattgtctttagtcatttcagttctcataggtatgtttcaccatgatatgttgaaaatttaatagcaaattaaagagtatttgtcattgatatggtgtctttatcaatgacatttcctaaatgtccaaaccaagccaacatttcctaaatccagagaaatggtggtcattattatttcgtgttttgtctttataagaaatcatcacattcacactgggtttataacttcacaatcatcagtaaattagcaaccacacacttctctaatcattttgaatattgaaccaagttcagaactcatgatgaatagccccaaacccaacgtaatcgtattgtttaatttaaaatctttcctcctccatcttcagccccagcttattgaagttttgtttttcttcttcctcacagaacatgtttctgattttcattacatcctgatgctgtttccttccctggttcctctaaatctgggttatattcatgagcactgctggaggagttagttgtgtgttcagtagagaggcttagactcatctgttagagtcagttgttaaaattctgcacactggctattcattaaacacagctttttgaaaatataactgtttactgtgagctaaatagcatttttaaaaagtactaagtattactccctttgctgtagtttattattgtctgtgctcatgggttatctatcagttgtaattctagtggactcatttgctctctgcatctctccccgctctgtgtgcaatgacatcatactgatgctttgaaattgatcttgtgagatatactctgggtacaaacagggtttttccttgtgcactatggtcaatcattgaagaacttcagcctattgctaatttttgacttttctcttgatccttcccgctcagaattgtggaaccaataagaagactgagcagtgaaggaaatttccattgttggccaataataggggaagggggagacagactctcaaatcagcttctccatgtggtaagggtctagagggcatagattcaaggtggaagaaaagagcaagtgagttaggctagtcaagaggtaatgaacagaggttcttccaggattcaattgccacttcttattgttccttttatggttctttctagccatgccatagctcttgtcaactgttgtggaacttgcagggggggaatcatttgttgagaagatgggactccagtgaggttacagcttgtctaaggactgctctggcagcccatttcgctctaacatgggccatttctatgtctgtaaaataatcctgttaccccgggagaaacccctcatctttctgagctttcatatctcttactgtaagttgtgtctggtgtggaatcattgactgctttgactataacaagtctagttttgaataaaggaaatcacagttaaggagccaattaaaattgcaatctgggaaaacacagattcaaccagtcttaaaaagatgtgctgagtttttataaaacggtagccatatttacagctttaaaccataaaggggacagaaaccccaggaactatgactgttgctgacaccccaagttaagctctcttgtacaaaaggggttggatacagtctctgactgggtattttggaggagaattattttttgcccaagaaaggttagtgatgttccaaaggtcagcttacatctggagttaggtatgccccttcaaaagtcccactgcccacaagtctgagatccaattaatgctggcctccagattccatttttaaggtcatccagcaattttattttattttgacttttttttctgtaatatgatcaaagagatcatcttatggaatgtggctaaaaatgattgctcttacaataaacaacgctacccttctttactctttctatgtagcaggaggaaatacatctgtcctcaggcagcagctgctgcttttgtcatttgtaaaaacactatgccctgttttatgctgatgtttttctgttgaagaatatgccttgatggggctttagggaccctaatggacagaaaagcaccctacatgccagacttccttgttttaactaattataaaactggaccgaatccatctacacagtaaatgaacgagacttttgagattcattatctgtccaggaagaagaggggacaataaagcagaaacgagcagagaatttgtagagttctaagtggcacctgctagtggacaggggaccggggacagctattatctctaagagcaaagcagtcaagggctaacaagaaatctatccagagaaacaatttcctcagtaagggtggggtagggtgtacaagaacccattgttcctggcttcagcttcacttctcacccctgccacatggaataaaagtgtgggatgttactttacaatggtgagttgctgaatcaaaataagccaattaggagagtcatagacaatctagtgaaagtaataaagagtaaggcatgaagatgcacactctagacctcatgccttgggaattcacaggcgttatagacattttgacaagtgagccagcattggttaaaactgattgccattaagcctgatgacccgagtccaatagccaggactcacgtggcagaaggagagaatgaactcccgagagttgtcctctgccttccacatgcctttcacaaacccatgccgtgtgtgtgtgtgtgtgtgtgtgtgtgtgtgtgtgtgtgtgtgtgtgtgtgtgtgtgtcttagcactaggtttcctgtagataagcgatgggaacaatccactttccttaacaatgaaaaggaaagccagaaagctgaaaggcatttaagcagcagaatgttgtgcggtgggtggcaggctcatccaagttccacacaggtagttatttacctcatgtattttgctccatgcatattcatcttgatgattctcaaactactctacctgtccaggggcctgacctccctttccctgctcctccttcactcccccagcaacccctttcctgaggtggctgatccccttacctttaccttgaaaataatgtatgaaaactgggtattagtggccctctctcctaagctcactattccagcctgttgattttcatcacatccatttctccctgtggtgtttgcagtaaacaaccacagatgctccttgactcatgatggggaaccacattctggtaaacttaacacggtttggaaatggtaaaggttaaaaaggtgtatttagtgtacttgagttgccaaacaccataacttagcaacacagtgttctcgggggtggagggggtcacttctcatccccaagctctcatggctgacgggtgctagctgcttgttgctgcccagcatagagtatcacctcaaatctcaattcaaaactcatagtgtgaaaaagccctttcccatctaaacaggaggtttcctcaaagggctgaatctggattttcaacacagagcccgagacttgactgaagatggagtggaccacttggagcttcgagtttgatgttagaacttcaatggtgagaatgcccagtgcctgctgcttacttactcaccagtgctggctccctgtacctgctccattttcctatctgctagatatttctgaggagacttttctgtcttactcaggctgagtaagtctctgtcactgtgttcctatactaccccataaggtattcttcttccacaagggttgtatgttgtggtgggtccattagggcgtgggcttctggagggtagacatgattcattctcatggcacaagggctttctagtgtctcccacatggggaatgcccgtagtgtggctgttttgataggtgggtgaatgagtgagagtgagtcccactagatggaggtggggctatgtaggaaaacttggagaagcagtgtgcaaggagctcagggtgtgcttttctggttaaaagtgtatcttaaaagctaatacttttgaactgggaggagagggtaatgagcatgatacagttcaaagggaatcttacaagtccatcttatgtaactcaataactcattaaatggcaaggctttgtgtggattgtcagatgcggcactacaatgctgaagtagcctgagagaggagaaaggaaacgcaaccattctattaattttttccataaatatttgttacacaggtgacctaagactctctgcccttacatggttgtctcaggtgagacaaactaacggcacttttcccaagatacttgctggagtgacgcaggctgttttttttctttttccagagggttggaattcaattcccaacactcatgttaggtggcttagtaactctgttccgctctcaacagctccatcatagctgcatcagccttggcaaacagtagtccaggcaagaaaagcctcagtgaatttcagatgaccctgcagcaattcagcaactcagcaagtcatgattggtgaaatgtgaaacttgtgatggttcttcatatggagcctatgatgggttcgaggaccaccctttattggcatttccacacccacatcgcacactggtccttccaggctgtagaaacagactgtttggcgctcttcaagtcaacctaagatgctctgttctcctgcctctggtgtagcagccttatgctcaagaaaaggcttctcctaaatggtctcttcttgcttcatctgatgttttttatgggtagagtaggctgagtgtttgttattggttggagtagctgaaggcaaagatgctgaagacagtagacaggggaggcatcaggattgatgggggagagtggaagcgtagagaagatgcaaggttgaagagcctctactagttctcagggcctggagctgtcagtctctggttattggcctatagattagtagatcaaagctatcttctgaagctccatacctgaggttctatgatgtaggtcagtccacggtcctgatgctagagggtgaaattactgaaggaagcgttttaccaagacttcctgctcaaagctataacaagtcacaggcacctccatttgaatgcatttgtgatcctttcctgtgatcaagttgcatatagaatgccctgatcaggctggccaaagcagcaggctgtaaaagtcaaacttcacctcactctcactctcactctcactcagtctggctccacatgacttaggacaagctgggaacttctctttcatggccacattgtttctttatacaggtgaattggggctggaccactctctcaggatgcatgcagatatcaaggttcttgagagtgagggtatcagtggggctgtggttcaggctggtagagccttccacctttaagagagctctgctcttacccatctatctttcccaactgaactgctcgagtttctttgctaactgatcaagtctgcttacttgcaagtgagatcgcaggaaatacaaattcagtctttaaaagttgccaagcaagggtgtgattcatgctcagaatcttacacttacctctgcatgtgggagaagacatgtacaacagtgttctttaaaggccgactcattcattctggtttcccattggtctggatttttcctttggtttgaaatttgctatattataggctcctctacctagtttttttcatctgtatagagtctctcattggcctagaacttgataaaaaaaaaaaaggctaggttggtagaccagaaagcccagggatcaatgccttccctgtattgggattacaaatacatgcaaccatgcttggcttgttatacgtgggatataggggatcaaactcaagtcttttcattgtaatgaaggatctacactggctgagctgtcaccagctcccaaatccatctgaattcctaattaaaatttttactttcctgactagaaaaaatagcatatgtatatttcttcatgcaatattgtagctatatacatatatatatatatattatatatagatagatatagatatagatattgcagattatagaatatcaagataaggatctggggagaatgactgaggtaatataatgtctgtgggagtcagtattggcctggtcctaagaaaacacagaagtcacttaggctgttgaaaagcacaagtaacattacacataggaatgggtgttatggcataaaggaaaggtgctcaagattcagggaggaggggtctgagataagtaaatacaaaaattctggaagacataggcagagcctgtctcatcagtcagccaaaatcaccaggttgtaaaattacatcattcctggcatcctaggaagagtagctgtgcaccttcttccactgaagaggtgagctgtgaatttaactttcccggcttctccagtgctcatctctgtgcacaaggcctctttgcacttgatgtagtgtgtgtgatatgaggggtctgtgtgtgtgtgtgtgtgtgtgtgtgtgtgtgtgtgtgtgtatgtatatacctgtgttggtgtgcctatgtctcactctcctgtatctctgtttatctgtgtgtgtatgtatgtatctgcattggtatgtctgtctgactgtctgactgtctccatgtctatgtgtgtttgtatatgtgtgtgtgtgtgtgtgtgtgtgtgtgtgtgtgtgtgttgtctctctcccccagtctctctctctctctctctctctctctctctctctctctctctctctctctctgtctctctctctctctctaatggtatttttgtgccttccagtttctatttggagaacaaatcaccctaggctgagcttcttcatagagacatatttctagcaggatgcaaatcaggactgtgttttatgattatatgttttaggacaatatgataatatgatatactatataatatgttttccatatggtacataatgcagctccaaaagaattaatgggtaaaggatctaaaaggagacaggattagaagtagtaccagatgtggtgtttcatgttcacttctgatgactagaaatgggtagcttgtggttttaatctctagatacataaaatactttgctcttcaatgccactttgcttgtgtgattccatttaatcctattctgttacagagaggttgttattcccattctgtagactataaagcttccacctaggtgttaaatggcttgagcaagctttgttaaggaatcaggattaaagtcaggttgcctggcttgagtattcttcttcacctgttggtcccccagtgttttcctttgtccatgttgagtttggtctccatctggaagtcaaactaatgctttcaagatccaaatcagatcacgatcctcccccccccccccgtaccctcccagacttctattggttctttattgtaatgtcaatcaatgctgagtccttgtagtagcctctaggttcctggacactctcatctctggctgtttcttccctcttcatcttctgctttccttcttgttcattatatccagcctttttgggtgttcatttcttaaagtagcaaacaatttcataccttttatgtactatttccttttcctagggtgcttcccattcatgtgtggcaagctcctcatcactcacgtctcagctcaaatcagaaagctgttccttgattttcttaagagagcacccttagcccctgtagtcatccacttcagtaagtatgcatactgtcattggattaaaagattttgccacattgaaccctcagcccgaggaaaggttggggcaggtagtccttcagctatgtacagcttgttatttccctcctttgctccagagggatcatgaatttttatgtatattattaggtgaacaaacatgcttaacatttgcaggtagcagcaccctgttttatttttcctataggttttatgactttcaaactcatcagtttatttattgcatccccctttgctgtaggcacccgactttattttgctcatccttgtatctcctgcactggctgaaatagcacatggcacacagaaggcaatcaggatatctttgttaagacaaagaggcctctcttgtcaagaacacagtgactggaactggaactgggtaagaattcatgataaaattgaggcaccagacagatgaaacaacctcacagttattgacaggataccttaaaatgtaactatttcagggctttaaactgctactaccagcccagaaataaagtaaatgcaataatgtaccattatgtttgcaaaaatcaaagttgtagaaaaatcagtaggtttaaatgttgggacgtctgtggaagttccaaccaaagtcagtgtttgtaaattcctactatttagtgaatatttaacagcaaaaccaaatggcagaaatttactgaggttaaaaacttctatcctttcaggaatatatagtctaatgaagccagaggcatatgtatgatgctctttttttgtttttccctgtgagtttctgctttccataaatttcagctcttggatcggtcattggctgaatgaaggtcaaacctcctagcagccataaccctaccaacacagctctcagcttgacagcaaaccaaggtttgcccttctctaggagaaaaaaaaatcacagaggttccaaaagaatcaatgccaacaacaaaactctgcccctggtgattagtcttggttgttaatctgactggctctggactcagagacaagctgctgggcacacctgtgaggaatcttcttgattacattaattgaaataagaaaatgaacaggctggaaggtaaagcttttggtttttgcttgctaatcttcactggtgagtccctctaccctgctcaccagtagcccatctacactgtgactgatggctgtcaccctctactgtcactgctatgctcacagctataccaccaacacaagaccacactgcgacccagcttctttggtcttgactgaatactagtggagttttaggaatcctccaggcccatgggggccagattgggattgggccagactgacggggaagccaccagttcttagtagtgtgaaaacagtcaagactgtgtcatgtaagtcaacctaatgaatctccttttaaagtatattcattctactggttttgggcctccagagaaccctgactcacacgtatgctaatgagaacatatcacattccacttgttgagttttttctttgtgaattttatcctcataaaatacacagagacacatagacacacacacacacttgccatgggaatttgtttttcctacatttgaaattctttcaatgactcatccacctacctagtccttaattcacccactacacactgaaacagatggcacagcccccttttagaataccatctatcttgccaagttggcaggaagcactcatacaatgctctctgaattgtgacttcagctacgactattatcctgagaagctgggtggccaaagagcttctcaaatcattggtccagttgccaaccgatccatgctttgacctggtgccatgtgaagggaatatagtcgacttccacatggtatggtccctttcattcttcgatattgcttggaaatagctttcagtcttctgggggcagggccagcagatcaggaacattggcaagaaacaatcccaaactgcctcttcatgagctctctgaaattggtttctaagtgaaacatgcagtcaatcagcctttacttttggatgagggaaccacacagcacaagttactgactttcctccactgaggaatgaggaatttcaaattacctgaatcgattgctggttaaagagaggtagcttttgcctatttcaaaaaccaaggaggaaggaaaagaaatggagcaattagattgttcacctgagtgtgggtcacttgagttgtattttgtttggattgaaactcagaatccaggactggggagatggctcagtgtgtaagtatttgctgaacaaacatgagggctggattagagtccccactacccacgcaaagtgccatgtggcatggtagcctacctataataccagcactgggaggcagagcagggagtcgaaagaacaacctggctaagtagacttgctgaggtgagcactggacagcaagagactctgtcttgggaaataagcaatcgggaaagatatctggcctcaacctcagcctccacctgacactcaccccgccccccacacacatatgcacctatacacatatggacacatacaagtaaatacacaaaataaaggcaaggttccttttagctcatggtttgatgtgatacagcttgtcacaccacaagaggcatacaagctagctgtctcccttttgtctttgtgttcagtcttgttttataccagtccattgggtagtaccacccacattcagagtgggtctcttcttcatataaactctcagaaaactctgtcaaagatatacccagaggtgtgactcataggcaattccaaatccagtcaaactgacaaagacaattaactcttaagataaatatgaataaaggtccatgactaggatccaggatggccatgctttctgcttcccactgaaagacccccgaagaggtactttcgtagaaggagacccgcacccaggaatcagcgagaccatgaacttggatgcaaaaccgcaagaggctttattggagatacgggtacccgggcgacttagcttctgtgaggccaagcgcgccgagccaagggaaaggggtccttatatagggaaaaaggcgcaagctaggagcagggattctattggataattctaatgaggcattgtacagagctattcccattggtcaatgtaaatgaggcgctatacagggttattcaaatgaggcgaagtacagagttattcaaatgaggtgaaacacagagtctttcaaatgaggcgaaatacagaatcatttctattggatggttcaaatgagacacagagccattccagatcagcatattctcaaggtctggtgtctggtacaacagactcaattccccccccctccgtgtccagatggctgaccttgggggcggagaccttgggacggagtgtttctcatcgggcgggggctcaggggcagggctccaggccggctcacttggtgttcgttctcgtgccggcccacctggtgctcgttctcgggccgggcgtgcggcgggtggcgggagaagtggaggccgccgggggtggggatcggggaagccgccgacaggaggaggaggagacaaacttgagaaagaaagggctaaggggcaggggtctttcaccacttgacccaacgtagaaaggagatgccattttaggaagtgtgcacagtatcacatcatatcctttatctggaagacttccctatattaaccaatcatactgaaaagaatggcagaaagaaaaagaaacacaggacaatgtatcccccgcccctttccctttgagttgaaggtggatcatgaacacaaccttgagatggaaggacatgttgagctgactcgtgcagcagcatctgagaagaaaaattgttaatgtactgatgacctctgtggcagggattgcctgatttctggtgtggccttactaaaaagcccttgtgttttaattaaagctgacattttagagatgagcagctagtagtaagaggataggggagagaagcttttgtttgttttgctttgctgcacggcattccttacaaaggtgagcagtaaaatccatttctcttaagagcttttctaagagcaacgtgacttccaaggaacaaggactgtgtgttttgtgagtgtgggaggaagagggttggggaaactgtaaaaagtagaataaagctttctctttcgacactcttttaactgaatgtttgctttggtttttggacaagtagcctacattttcattttgcacaaggccctcaaattatgttgctggactggaccccagctcaggcagtgcctccattctttgctcccaacaccctgccagttgccccccagggcatagttaagggcaggatcctaaaaaggaaggcagaggcaccagcacccctcaggcataatgatgtcatggtggcttctacaagaaaaaccccagcagcagctttacctccgtctccatggaaacgggtaatggattaacaatgaaaagttgaaacatctttctagggaccggcttctaggagggaagctcttaaacctattcactaaaatatgttaacagacggtcgcttgccactctcctggcagacataagggggcatagatccttcctgtgcttcagagaacaaatgcaggacccagtgctaaatgaagatgcattcttctgtttgtgtttccattcaggagctaagataagagaaaaccagatcagcccactgtatttcagtctgcctgctggaggctgccgaaagacacgtgatgttgagctttctcattcctggatttctgtcagcgtgtactttcttatttgttttgatcttaaggtaaagaccttcagaaggtttatatattatttggtctaagctggacttggaagattgttttctctgtctctctctccctgtctctccctccttctcccccctcccctcagatgttcatttgcaatgggacaaggtgaagaactagttcactcctactagaactttagagtgtcatccatgatggagaaaggggcagcccagggtgagtgagcagcagaaactacctctgggtcattctgagctggctctacctctctgactatgactgaaagccacagctatttttgtaagagtaggagcaagaaacttcatctttcagatgagccaggctgtagcacagtccccatcttgttcttggacagtagctgaaatgtctttggtttgtcttggccagaggcaaaaaaatgacagaagggagctcttctttcttatatctctattgccatgaacatgctgcctggatgctgcccatgagggtgtgacaaacactccaggccagacaccagtcccttctggtgaacaactttggaactgcatctctgggttttcctgatgaaggtggtttgtatctagtccccagtttcaaatcatctcctaaatgagtttaggctcttaactcttgaggagagaatttccttctagtttccttggaggccattgaggttggactatacttcctgtttccctggtaacactagaaaggtaaacagtgtttttgctactctttaggcctactggtctgaagaatggaatactacgggccttgagtggagacaggacattcagacgaccgattagaacactacatatgttgtgtcttgctttacgaagagttaatccagctgagcctgtcaagcatccagccaggaagccactccccaggaagtcagattcatctgaagacattctacaaggaagggaatagtagttatcccttcatgagataatgtttgttcctatcttcctcacaagtccttcctctaggccagtggttgtcaaccttcctaatgctgtggcccccaaccatgaaactattttcattgctacttcataactgtaagtttgctactgttaggaattgtaatgtaaacatctgtgttttccagtggtcttagggtccccctatgaaaaggtctttcaatcttcaaaggggtttgagaccccccaggttgagaacctctgctctaggcagatagagcctcttccatacagcctgcctgcttttactcgtaagcattacttcttttttcctctctctttttctttaggagctggcccgaacactaagcatgctctcttgacacctggactttctcacttcaaaaaaataaatgtcaccatctctcccgttctgccacgtggtcactgggcaagctaacttcactgggccccaacttagaaggcatagctttctttcctccatctcccctctcctggagcggctgagattcacggctcacccacccccctttgctctccctcaaactctaataacattgtccttgagcttccatcctagtacatttctaaattctttcattaatgagactaagaacccagattttcctgctaacattgtagggagttctgaatcatctcccaaagaaatgctcggaaacctctctccatgagtttggggtagccagcctctatttttcaagaatgacaattgctctatagcagaagtcaagggctgtcaaagtcatccctgttcctgagatctggacattttcctcctccagtcaccctaaattcccatcagggtgtagatatggaaatggaggcaatcgggcagaccttcttgtaaaacctgccttagtccatagcataaacaatattgtgccatcaaacaaatcaaaacaaaacataatctctcctttagctttccaaagggtgacatgccagggttttgctgtgcatctgagagtcttccctgcaggagcactggtccaagagttcctacaggctcacccatgtggctcccttgacaggaaaagaaaaaaaaaagcacagtactggtgcatctctgtggagaggagataagtgccctcattaggaaggctttgaaaatgagggattgagacatcatttgatctgatttgggtagcactacactctttgcctgcatgcattaaacaaaggtgaatagagtaaaagggcagggtacgggaaggaaatagaaaagtctgttgaagacaaatcctagtgagttttctatcgaggaagccaacaaatagcctgttagaaacaggtcaggggaatatatatatttatatattcattctccatctatcttttgtgtctggcttgcagtccagaaagccttaattctgtggtctattaccatcagagcatgaacatgaataacaatgatgccggcagttaatggctttcaacatgacaaagttgtctgaagtgttgtatgctgggaagtcaggctaatttccttacaggggtcttttcattgcccttcagatttctgctaaaacaaaacaaaacaaaacaaaacaaaaaaacaccaccaacaacatatctgggaaagattctaggcttcttttgccatcctcccatgcctcttatattctttgcctagcaagctggaagccctgagttcagtggccatcactgcatgaaccaggcacggtggtgagcacctacaagcccaacactccagatgtggaggcaggagaatcaaaagttcaaggtcatccttggttacatgtcaagtttgaggttagcctgagctatatgagaccctgtctgtaaagaaggtgattacctttgtcctcggttctgttactattttctgtattgcacagtaaagaggtttggggacaccaagtcagacagtttctctgttattggggcaagctgtgactcaggttcttcagctgtaaagcaggggtaatgctaatgagcagctggaactgtttgttatatttttaaaataaggtttaaatggtggtaatatatgtaaaatgtagactgcattttttaagagtaaattctaagctaattattcaaggaaatcacttgcactgttactgtaattttcagtctcttaaactttccaatttgttactttatagagtaaaaggaacttggcaggtgtgattgatctaaggaccttgagatggggaattgtcctggattattttggggggttcagtgtaatcacacgaatccttgaacgtggaagagctcagctggtagtgtgcttgcctagtgttcaggaagtcccggatctgatctgcataggcattggcttacactcctctatccccagcactcaggaggcatagacaggaggatcagaagttcaaggtcaacctcggccacatagttcaaggccaaccccctactctacggaaccatgtctgggggagggttgggaggagagagagagaggggaagaagaggaggagagaggagacgcagaagagaaaggcagaatggagacctgtggggttttctccacttctccactttcctgcttttctctctgtagagggagaaatgaatgcccaaagccagaaaagacaagaaatggagtccccactagagttctgaggaagctatgcagccctgattataccctatctttagcccagtgagactcgtgtcaagaatcacagtggtagataacatgtttagcatgagggagtgagtctctctctctctctctctctctctctctctctctctctctctctctctctgtgtgtgtgtgtgtgtgtgtgctttgactcatgaagttttcagtgatttgttttggtaataatagcaaatgaagtatgaagcatttatctattcttttatcagtaaaaactcaggaatcagatattggggcaaaaatctgattgatcagggaagctgagaagtgatcggtgacctcctttctctctccttccttgatccaaaaagcctgagcatctccctaagcccctccctacatcttcctgtctctgtctatgtgtcttggttcctccaaaaacctctttgactaacttggtcagctagtagctagctcttccttctgattgaaagcaaactttattgtcagccttgggagtgtcagagtacagcgcaaggcaccagtaggttcaagaggggacatccttagtgattctgagattgaactgagatctccaaacttatttcttttcccaaggttgaattttcacaagactagtaagaggcagacccaccatttgaatgctggttgtttgtctgataactcaaatgttgtcatagataatttcccatgccccttctagctgacgcctctcccagcagagatctccaacgagccttcgtggtccctccattttcctgtccctgggaacatattttatttgtctgcttgatcacacacatctggtgtgtgtgtgtgtgtgtgtgtgtgtgtgtgtgtgtgtgtgtgacccagtcacatttctccaggaaggatggggctaggactaataagactaatagagcttaaaatgtatgtgtcttcagtatacctatcaagacccaaagggttagccatgagacaggaatactcaaataacatgacataaagattggcatttgtaggttttatagttgggctgtgatttatagaaattgctgaactgtagactatggtctatttgaaatttaagtactgcagcattgcagctcattggtagttatcttatttgaagatattcatccttggattttggtggcattttgctgccacatgcagactattgactactaaaatagcattcaactcaaatgataattttaaaaaaatggaaatagatggcatttcatttcactgcattgtaaaaatcaaatgggagctatagaaatggttaagaacatgcactgtccttgcagaactcggttccaagaattcatacaatggttcagaaccacctgtgctgatattttgcttatgatccaataaagctttcgtgaaggtcagagtccaaagctagccacatccatagaggccaggcaatggtggaacacacctttgatcccagcacttgggagacagaggcagacagatctttgttagttcaaggccaccctgggctacacaagattaaatctgtctaaaagagaaacagagctcacaaaaaggtgatcccagaacttgggatcctacacctttaatcccagcactagggaggtggagataggagtgatatggctgggtggaaaggaatataaggtgggagaaggcaagagagagaggcaatctgaggcagtctgaggtttggtggagacagatgcagtctaggtagaaagcagtctgaggacaggatcaccctttgatctgagtgttgtagaggtgagaactctcaagtggttgaccactttgcttccctgatcttcagctttaaccccaatatctgtctctgggattttattattcatgttacaaccacctgtaaccccattttaggggatccattgtccttctctgacctctgaggatgcatgtgtgaacatggtgcacatatactcaggcatacacataaagtaaaataaatattaaaaataaaaccaaccccttgatatacatcaatcaggcttttaatgcggaaagtaaacactcctctgttttccaaacttttctttctcttgttataaaatatatatgtatgtcatcaaaatattcatgttaacaactgttaaaattttgatgcctttatttccccttccttaccatttgttctgcctagatcttcaagtactatatgaaatataggtgacaaattgtgtaccattggcctttcctgatcacgagggagagggttttgatctacagcttctcaaacagggagagtccgtttctttaagggtgtccccttggtcacctcgccatgttcctccagaaggccacacatctgagaggttagggcagcaccagctgtacttgatggatttacaaaaggaagaaaatacgcagttgggtgggtagggaagggaggtcagatctgggaaaagtggaaggagatagaaagtatgataaaaatacactgtacaaaattctccaggaactaataaaaatgaggcaaaaaaagatttcaatatctcagcattgaatgtgatgctatctgtgagttttttagtgtataacttttgttgtgttgggggagttcacttctattggaggtcattaagtgagacattacttttatcttgaaggggtatcgaattttgtcaatttttttctgcattgagatgattatatgttctcccccctctttttgcttcaatgttcattggggatatcgatctgtaattttctttgcttgcagtgaaaaactctgggtttgatatcagaataatgctagcctaagaatttctaagttggaaactgttgtgactcttcagtcattgtccctcttggggagattctgaggagtggttttaattctttaaatgattggcaggagtcaaaaagtgaagccattggattcagagatttttctttgttgggaagcttataattactgacttaatttttctgttacttatagatttgatcacattttctatttcttgatgattcaattctggtaaactatgtacttctaatcatatgttcatttcatctatgtcacttaatttgttggtgcacagtagtcattcccagtactctctctctctggttctttttatttctgtgaggttggtagtaatgcctcacttccactcctgactttggtagtcttaggtttgttactgtagaaagtgctggagatggaacagagcacactcacatattcttggccctgagctcagctgggctcacagctcaaaggagtttcttttactagtcaatcaaactaaaggctcaaataactttaaaaatctttccaaagaaacatctgattaacttttttctactttttacttaatttatctttattatttctctctttggtcttttacaaaattcactctttcttagtcactctataaagttagattattgacatgagatctcttttctactttaatgtaaacatttatagtcataatttgcctctcaatattgctgtcattaatttcaatagccattccccaatctttcaccctgtcctctaccatgcatggtcatacacaagccctctagattcatacattttcatttcttgaatgaactctcttctctgtgttcttatcattgtctttgggttggaattaaaataaggcttcctactgtgctgtcccaatagatacttcaactctagttcatttttcacattccataattggtcttgaataacaacatgatattctccttataaccatatgtgcatgctgttgattgctttctcccaaccttcagtgaagtctaaacttaggccatcgcttaggattgtccaacctatgtcccatagctcacatgtgacctaggagaggtatgaagttgacccagcactaattataaacttggaatattatgaaatatttttgtgattttttttgaaaatgcaattgtatagttcccaagtgtgaactctgtagatggcaatattttgttccaatgttgacaggttggacatacctgaagggtctttcacatgtggcctctaacctcaccaatctggcctctctcaggttaggcttatttaaccacgtgtgttcccacaaaagtctgcatgcatcatttgtaaccatttgcttggaaagataattcttttcctcttcattgaatgagttgtattcactactcaatactgactcaagacacatttcatttggaattcctacaacattttctctctgctctaggttaaatactagtcatgcacattgtaccttgtatatgcattcatcatgacactgagcacatcttaatctataatattttgtttatataagaatcttcccactatataaaagggaaaggaacctctggtttttatgttcttaatgcctagaagaattaggcattatgttaagggccatgggccctaaactatgggtttaaagcccatctttgtaagtcctttatgacctttaagttttcggcttcaagccagctctgtgagcctcctataacctgtaattagatggtttggccaaaaggaactgctaactgcttctgttccaagaaagggcctggggctttcgctgttccggggaagaccacaagatgttccggctaataagaagaatgctcctgccccagaatacaccagatgttccttcctgttattaccccgcttacccaatttccttggtgcagggctatataaacccacactgaaccccaataaatccagatcttgacaattgcacagatggactctggtcccctcttttttgccacttggtctccttccttctctcgcccatgactctttcaggcagcccccctctggaaccctgaatgactgacccgagggacgggacaagtggagccggaacaggggacccggagtacagtcagctgtcggatggcggaaagacagcccgggacaaagaggatcctgcagtcggctagactcgatccctctccaggtggaggtaaggtaccaatcattgccgtcccaatgccatgggccatgttatgggtaaagaattgaaattcataacagaagttaaggtagcccgcagggagaaaggagtaagagttaaaaagaaagataaaaaggagtaagagttaaaaaggagaagataaaaagaaataagagtcaaaaagaaagatttagttcattttttctgctttattgataaagcttgtctatggttgattttaacgggaccagacatagctccccagacctgggaaaaggttgggagagttacttcgcccacagcgagaaatgctgctggcagcatttcttagaggcagccaagcttgggggctgcaacttacagccttgggagatgccgccatggttgatggctaattaatatatataaatgctattgaaacagccagactgtttttgagacttatagaaaagaaaaggcaacatatttaagcttagaattgttcagattttggatgctcatatttcaatgattgactataagctactatgttagaaatttcaattagggatttttcttttctacaaactgatcataacctaggcaaaaggagaaatgtgagacatatgcaagttatgaatgaaaggtgtggccacacctggatgcatgatgtgattgtgaatttatgaatgcagatgaatgagaatgcctaaattaccttggatatgattagagatatttacattgcctcagatattgtttaaaaaatatcaaaatcactttaacattgccaaaaagagcatccagtcaatcagtcaatgtcttaacaggagaaattatgatttgagtcctaggagacagtcaattaaaaagttagcaaaagcctataccattagcttagagacatgagaaatctatggatgattctgtaaaatttgacagatgagaggatacagatatccctagatttttatggttaaaaaaggacatctagaaaataagggttgatgcatgattttgagaagggttttgtgagaagcctcaaaaaagagccaacctgttagattcacaggttggcaggtcagctaacatgcaaatgaggtcttatcagcttgtcagcctcgaaggttagattaaaaaaggctactcagaaactttaaatctggaaaattgttaaggatgtatgttgtattctaaagaaattaataaaatattcattggttaagtaccttttttgggacatctaatgatgatttaaattctttaagtaagattctataaggagataatgatccagatatacccaaacagctaactaagaaggtaggcaagttctataatttgaggaggcgattcagcatcatcagatatattgactatacaaaaccatgggaaacttatatactccctacaaagcatagtccaacttctggtttatggcagaaggaaccattactaggttgtgcctacccatcttactagcctaaatattttaaacccttattttaaagcattagcctacttggtacagaaatgccatatagattctaaaaagtattttaggagaaaaccaagtatgatacatgtctcctactctaagcaacagtttaattgatggtttcagaacaatgagtcataggcgattgcctttgctcaattttcaggaagaattgataatcaatttctagttcatggactgttacaatttgcactaatgcatccctttgtatttccaaaattgtaaaaagcagtcctataaaaatatgctatgttaatttttaccaatggttctattgggagagtcacttacataggtcattaataaaaagaaatagagcagacagctctgacttcagctcaaataatcaaactacaagctgttacaatggtcttttaaatcctggtaaataattcacttaaattgtatactgacagtgactatgtatttaaggcttataaggtaacagaaacagtcccatgcacaggataatcaaaatgttatttgagcaaattcaaaatgttattcacctaagaattatcatgtttatggggcacatgggaaacctattaaataggtctttccctgattactggccaaatggaataaattgtctgattaacaaaatcagttgatttgcctcaaatagaaaagcttgacaggcttgtaacttttcttcatcataatagcaagtctaagtaagaaatttggcttaaccgagagactgctggtcaaatcatcaaacaatgtggaatatgtccacaatatggctatggctaatttaaggatgaatcctcaaggcctactccccaaccatttatggcaaatggatgtgattcacattacagagtttggcaagttaaaaatgtgccactccacaaacaggagaagccaccaggcatgttatatgtcactgtttaagatgttttgcttgcatgggagtgccaaaagttataaaaacagttaatgggtctggatatactagcaaagccttccagcaattttgtgcttaattcctgagaccggtgctactggaacagcccttatggcctagtcccgcccagtgtgcgtggaccgctgggcctttgggccctttggggatgcagcatgctgctgacttggggaagtaaaacgcctgcctttacttttatagcggcggtgagacatgaggcgagcccgcagctcaggcataggtggctcctgagccagcgggatgcacaagccaggcaatggttgcgcacgcctttaatcccagcacttgggaggctgagacaggagatcacttgagtccaggaattttgggctgtagtgcgctatgctgattgggtgtccgaactaaattcggcatcaatatagtgacctccagagagcgggcggccaccaggttgactaatgaggagttctatgccatgcattgtctgtgctaaatttcctcatgtatgatgctacaaaaaaatcagccatggatcacctctggcatccatgaacggctcaaaattatgctcaagccttatggaaagatcccctaacttacaaatgtcacggaccagatccggtcctcatttggggaaaaggacatgcatggttttttgatactcaggccaataatgctagatggttgcctaaatgccttttaaaactatataatccacccaggggaagcccctgagaagctttctaattctgcttaattctagataaaagatgctgtctttctggctacttgggcgtttatcaccttcgattgctgttgccgctggaagcccttatcagatctacaactacacctggatgatcctcaaccgagccagtgatgctgccaatgcttcacaactattaccttattctctccttaattaaccctactgttcaggcccctcatcaagccagccactcccttatggaggactgttgggtctgctagtcttccacccctcccctttttcagggaattgcaggcatttgatccctaccttgcctgttctaccggattgactatttactacaaacaggactccaaaatctaaaggactctttggtttctctatctgaaatgatgttgcaaaataggaggtcttgacctggtctttcttagacggcctctatgcagctcttaaagaggaatgctgtttttataaagataaaactgagttaatacaagctaatataaaaaaataaagaaaaatctagaggataaaaagaaacaaagagagcaacaagagtcctggtataaaaattggctttccctcctgggacctcttataggattattgctgttgatttcttttggcccgtgggccttccaaagaataactccctttataaaaggtcaaatagattcatccctttctaaagattttgtctctgtacagtatcactggatccagaacccaggtgacgagcagcgtgacgagcagagcgaaccaggcaaccccttaggccatcaagagaggcttaatttttctaaaactgttaaaggtctagtcacaggctttagagccaaacttgccctccctaggcatgcaacactggtagcccccggtacaaatggccacctccacgacaggcaacttccctcctagactaacctgagacatgggacccctggatggcgggtttttatcacccgaagactggtaaagtcaatgaggtggcaaggtcgaactaacctaagacagagacggtcatgtacaaagacccccctaagaatgctacctgtggcctagtcctcacctccctcctttgttaaggaaaaaataagggggagatgttaagggccatgggccctaaactatgggtttaaagcccatctttgtaagtcctttatgacctttaagttttcggcttcaagccagctctgtgagcctcctataacctgtaattagacggtttggccaaaaggaactgctaactgcttctgttccgagaaagggcctggggctttcgctattccggggaagaccacaagatgttccggctaataagaagaatgctcccgccccagcatacaccagatgttccttcctgttattaccccgcttacccaatttccttggtgcagggctatataaacccacactgagccccaataaattgagacattgacaattgcacagatggactctggtcccctcttttttgccacttggtctccttccttctcttgcccatgactctttcaggcagaccccctctggaaccctgaatgactgacccgagggacgggtcagcattaagtctccatggaatgactaaatgggtaaatctccaccattcttataatatagtatctcctttcattctgctaaagaaaattaaaagctcactattattaataatttagaagcactgaatagatgaatgtgtgggaaaggtttgacagatttctatgatttttaagaaaaaagataaaatcagtgtaatacaagtagctttttgttaaacatttattgatataaaattcttctttttccatttttatgagacacaaactgcatcttcctcttgttagacccccgaaaactcaagtatccggggtcccaggccacgttcgtggtcaccccaatcaccaggcggatttgagagcttgctgcaaactgcacaaggctttattgtaatttaacgagctaaccccatgttagctcgggtctttcacccacccaccatggcggatagctagaaaagacggtttgaagccgctgcgcatagatctttatagggcagcataaggggagtgtctaggggtatgcacaggctcacgattggtgtgcctccaggcttggagggcttgccctgtgttgattggtcaactggttgttatggcccataggccctcccagggtggttgctatgctctgcttgtcattgctgtgcgcttgtccataaagcacacccagggtcgtaaagcatagcgccaccagctaacttctgattggttccttgtcacaagacaggaatctgactttctagtgtctagggcaaggtcatagaagcacatgttcgactgttatggctgccgaaagggaagctggtcccttcactctcattcaatcagatgttacagatttgtggtctattcacatctctcccttgaacccatcctaccgttctacaaactggcacatttactactttccgttttcatatcttcccagcccctcaaccaagctgtcttgacccggcatgtttcagccttaagccatgaggttctgcctgagtgggggtgcttggacctggaaactcctagcaatccagcagctataaaaaccaaacacaggcatcttgtcatctttagagagctctcagttccatgttgtattagagtcttttctttatttaccatcttttcggctgtttcgtaaccgtgctttcatgaccacgaggaaagcatttctctccttgttctcctctcttgttagctcgaacctaccctctgtcctccttgttaaacccctagcacctctgcccaggtgcaggcctattcagatgcttaggcccatagagatgcaaactaggagacattccccatgtcattcaatagcaaatcagttagcgtctgatattcaatgtagaccaaagctcctggttcctggaacccaggggaaaactccaagcatagcctaaggcagtagttattttccctttactgaaggaaacttccctgttggtgcaggaccagtagttttcccagcatgcaatttactatcactttagataacattccactctggtatttgttgaatatttccagagatgacttgaactgtagttctttcttatgagtggcctttcttttgattttggtcacaatgacagtcaatactgtaatcactttggtggcaagtcctgcatattgcattgcctcctgccaagggtcaatttaatccaatagtgttggagaatgactgggaaagaatgctaaatcaaattaggccaagtccactgagaggctgagagtttgtgcagcacctcaataaagtgaccagtcattcccacggtggttattttgtttagagaggagaaacaaaatttgcccttagaaaagtggcatcgtctggaaaaggcaaaagtaatttcaagtttctttgagaccaactgccacatgctttccttgtaagatgctagaagaaaaactcactcttgcagaacttatgccagcccatcccattctcccatcaatccccatcccgtagttagctgaggctatctcattctttctcaaatgctcggggttgtttcttccacacaattgcactgtttctctgaattttgtcctctctaaaatgttgcttgctacaatgaacttgtgttttcctatgaaatcatatctttcttcctctattagcccaaagaggttctttcaatcaccccctcattatatactttatgttgtgatgacttacttcttgtatgttttacattctcataatacccatgatggtgcctagaatagtgtcttgagtctgatgataggtcactgctgagtgtaccttgagagacacttggtctagaacagtggttctcaactttcctaaagctgcaaccttttaatatagttcttcgtgttgtggtgaccccccaaccataagattattctcattgctacttcataactataattttgctactgttatgaatcataatgtaagtatctgtgttttccaatggtcttagataacccctatgaaagagccatccaacccccacaccaccaaatgggtcacaacccacaggttgaataatgctggcctagaagatagagagagtgggagttggggatcccattgagatataagggatgtcaacgataaagagtcacttctaccacaaaggcttggaagggaaggtgctaagtcaaaacagaaactacattaggaactttcagaacagggatgttctcctgccctctgggagggagtgaaggatataagacagaggagatcccaatgttctcagttgtgtctcattttggaacagatattctgggaagacaaagaatgtgaccctgagcctcaaggagggtgaagatactctcagcaacatgaaagttttaggttgaaaaaaatgacctcagctttttgtataaagagcatttaacttattttggcaaccccagggagccactggtatttggagagtgagttcagataaagataatgtcagccattggcacacagttcttccagtgggttcaaggtctgggtaacatttgctatcactgatgggggtttgatttgcaaagtccacatctgctgagcttcagactcggaccctgggggtccagggctgtttgtcacatctgaaaaatcctgaaagtacacatttacccaccacaggctcctcaggctgactaaaataccaagcaattttactctgtactagaattaaattctttccatgtaggaactcttatgctaatgtgaagttgattggtaaagcatgaactaattaaaagtacagcctctttggtagataagcgcttagaaacaccggttttctacattaatggaacaaagacttcagcgttcgctcttccatttgtttgggatattttaattcgttagctctggagtagtctatgtccctgtgttgttactatttggataggtttgtcgttctctttctcacctcacttactttcacctgtttaacagctaattagcattaaatgaattcttttaggtgcaagtttgccaacaattgtatgctttcacaatctgccaaaaatcattcatccagacacactgtttcatcatggagtttgttgggagggtgctgttgtgtacgatgattcttttcatttaattggctcacatagaacaattcccagagaaaatgagagcacataatttgagaatactagtaaaatattctcacattatgtcttatcctctggtgcttgtttacatgctcagtgtgttttaacatgttttctattactgttgaaataattgcgtgcatgttttggtattcttttaactaaacagtatcaaaataatactttactccaaattgagaggctaaagaaatcacaagtttgttacggaagcttggtatactgagaacaggggagagcatgaaaatgtggaaaaacaaagggggatgaaagaaacccacaaactgatactttgttaattaaaccatgccctggcctgaggggctccggtaactcggtaattcgtgggtccaaggtggactaagcctgaaaataatgggcgggaaagaaaagtgagaccaagcagtgtccttgtcaaggtctactttattaaatgcaaacaaggagtttttaaagagaaaggaggaagtagagaaagaggaagtgggggaggaatgggtgttaattgctctcaggcctgagcaggtgtctggaacttcccagtggttatctcgaactctaacctaaggggtggggtgcttgactaattggcggtttagcatggaggttgccaagcctcttgtaaaagggacttttatatctaaccaaggctggctcctgacatctcccccttctatgtataatagaatggagtgtcttccttaggctacagtgacaatgaggggtagagcctctgtcttaggctacgttaggtgcatctgcccccagcactccggggacctttcataaggctagcagctccagagtgctttggagtgggcccctggggtcagcctcacgctaatcccatcatggagggcactacagcccgtgagatgggtcagtgtctggcctgcagcatcatgataatcccgtcattgacatctccaaggcctagggaactgagaggtttgatgttcaaggcctgaaaaatctaggcctttaggaggattgtcggggtagcagctgaactgaaacacaatagtctcttttatacaagaaggtagaggtgacaatataagtagtcaatccagtagaacaggcaaggtaggaattaagcgcctgcaattccctcataaaagggaggggtggaagaatagcagacccaacagtcctctaagagggcgtggttggtttgatgaagggcctgaacagtagagttaattaatgagagaataaggtcagtggaggagggaggtcctggggggatggtcgcctgaaacacagtagagagatgggtcatggagctagtggcaggggggtatctgtggaggaagtttgcccttggtgtccttattgggatgcaactctgggttgggtccgatggctaccttcttggtgaaaggaaggttttttagcagctggatcttaaaggtaaggccaatgtcacggcctgaaatgtagaggcgaaggccccagtggacacctctcccttgccaaagggaggatgatttcccttatcggtaaaggtaatttgtagggggttacaccaatgggagccactgtgggaattaaggcaggttggccctgaattaagttgttgggatgggggggggtctagtctcttaattgtcataaggtcccaactggaggaggatttccagtatgtatctccagtggtctcacacccacaagaggcacagaagtaatcattctcaaatccacagcgagcctctagagagtgatctctgtgagaaccaggacagatgtatataggtgcccttgtaagataagttctagtgaactgattatagtaattagggttggttgcatacctcgtggaggtaataacaggtctagattgtagcataaaatgggagggagttccccagagagggtcggctcccatagccaagtcacaaagatctactattaggggggaataagagggctgaggtccaatgtatgtagaggcattggcaacatcaccggtttggttgatgatcatccaggtgtagttgtagatctgataagggcttgcagcaacaagggcaatcggaggtgagaaacacacaagtagccaaaaagacagcatcttttatctaaaattaagcagaattagaagacttctcaggggcttccctggttggattatatagttttaaaaggggttcaagcaaccatctagcattattggcctaaatatcaaaaatacatgcatgtccttttccccaagtgaggactggtccatgccatttgtgagttaggggatctttccataaggcctgagcataattttgagccattgatggatgccagaggcgatccttggctgattttcctgtagcatcatatgtgagaaaatttagcacaaacaatgcatgattgagtaggttcttatgattgccattagtggggtatagaactcctcctcctgaatacagtttaaacagcatgtttttaagtgtttggtgagctctttcaacaatcccctggccctaggggttgtagggaataccagtaatatggctgatatttaaatgagaacaaaattgtttgaaagctagactggtatatccagggctgttatctgttttaatagtcttgggttggggtaaggtagttaggcaggaaagaatatgatttatgacatttttggtggcctcgcccgcctagagcgtgctgtaaatgaaaccaatgtaagtgtcaatagtcacatatatgtattttaatttcccaaactgggagaagtgggtgacatccatttgccaaagctgtccaggaagcagacctcgggggttaaccccaaggtggggctctggcaggagagtaaaacagcctttgcaagagcgcactatctctctagcttgttctctggtaatgccaaactgaaggcgtagggtatgggcattgagatgatgggtggcatggacttgtcaggctaaggatatggggtcagaaagagggaggcccttttgagccaaggtaattatttgggtggcttgatcaacggcataatttgcccaagaaaggggcccaggccacctggaatgtgctcgaatgtgaccaataaagaaaggggaggttcgggttaaaatcaggtgctgaagagtggaaaagaatggagccgcacctgtagatgggcggatatagggaactgtctcaagacagggaaaggagaaggcaagataagcactatcagcataaaggttaaagggtacatcagggagagtttgaaagactttaattatagccaaaagttctactatctgggcagaggaggcagaggtttgaaaaataaaagattttgccatctatagaataggcagccctcccgtgatgacccatcagtgaaaaccagtgcggcgtcattaaggggagtcctttttgttacttttggaaagattactttttttttttaaattggacaagtcttttgttggggaaatgattatcaataaggcctaggaaggatataagattaattgcccaagtatcttcattttgggtgagccattatacctgagaaggggtataagggagtacaaggatgtcggggtctttgccaaataatttgaaactatgctctctgcccatcctaatcagtagagaaactagacaggggtaggtaaggaggactcggccaggtgaagcagagagatggacccaatagaggggatcgttctgccaaaaaaggcctgtgggcataaatggtgtagggaaaataaggaagctcaagggtttattggggtaaaaataagaaacatgttgttggttgatggcttctccaccagggccaaggcctgggtggcttcaggggtgagggtgaggggagacagagggttagaatccccttttagaatgtcaaaaagaggtttgagttctcctgtggtgatttttagatgggggcaaagccaattaatgtcaccaagtaacagctgaaagtcattaagagtagtaagggaatcttttctgatctgaaccttttgggacataattttatttaggaagagtttgtaacctaaaaagagttgaggggggtgagtttgaatcttttcgggggatatctgtaggccttgggtttgtaaggctttaacaagttcttgggtgacaaggctcaaattgtgttcattaggaacggccagaaggatgtcatccatgtaatgaatgacgtacagatgaggatgttgaacccgaaagggatctataacctgggcgacatatttttgacagaaggtgggactatttgccataccttgagagagaactcaccattggaagcgaggcatagggcctatatgattagtaataggaatactgaaggcaaagcatttgcagtcatcaaggtgaaggggaatggaaaagaaacaatccttgagatcaatgacaatttgagaatattgtttagggatggctactggagagggaaggccgagttgtaaggctcccatgggcatcatagtattattaatggcacggaggtcttgtaataagcgccatttacctgatttcttttggatgacaaagatgggcgtattccatggggaagtagagggttcaatgtgtaccgaagttagttgttcctgcaccaactctaaggctgcggatagtttttgggaggtaactatagttacctatagttaactataggtagatagtttgggccattggttgatccagacagggctatcattttttccaggtgattttatcagcctggagtgcaggtggagcaatggccctcaggaaaaaatttgaaatccaattccatggcgatcattttttggatgtgaagcgaggggggtagttataccctgaccatgtttaccaagaccttgacccggtaggaaaccctgagagagcatttgttaggtgtaggggaagctgtagctgtggttatctcgaactctaacctaaggggtggggtgcttgactaattggcggtttagcatggaggtcatcaagtcttgtaaaagggacttttatatctaaccagggctggctcctgacaaaaccatgcatatttatttaactaacacatgcatttattttgagatacagtctcagtctatagtttgtctttctaccctgcacatcaactactcaagtatgggattacaggtacatgttaccatctcccaagtgatattttatttttaaaatattaattgatatatacatgactgtacaaatattctctaagtgtaaggtataatgttataatgaacacctggagcctatccttcaatctaggatccttaacacatacccatgattttcatataaaacacactgtcctactatttttagcgcccccccatcttcccacaaaaattctgcatttttggtttttttttttctcattggttcttcttctatgtcaaacattgaagtactaagtaccatggctttaggcacaaaacttaaattgcagttaaatacgttaagaacataataggctatacacctacctaaagtctaaagaaacagaaaatagaaaagtataaatacaaataaaaacaaactttagctctgggagggcctatgggccataacaaccagttggccaatcaacacaggacaagccctccaagcctggaggcacaccaatcctgagcctgtgcgtacccctagatactccccttacgctgccctacaagatctctatgcagccgattccaactgtcattgctagccatctgccagggcgggtgggtgaaagacccgagctaacatggggttagctagttaaacaacaataaagcctcatgcagtttgcagcaaaaacaaaacaaaacaaaacaaaaaacaaaaaaaaaaaactttagaaagataagagattaaatgcatgccaaaaccaaacgaattagtttttactgatggtagatgagctacctaacaacaacaaaaaacatccccaggatggactgagaagcaaatatctggcaacatggcatccaaatgagccaacaaaagtaactttaaagcagaagtttgccaggtaaacatgaagccaagatagtgaataatcaagaagtctgttaaggagtttggttctcaatgatgcagttaaaataatgggattctacaagccaaatgaagttttgaagtgcaaaaagcaaataaatataaataaaatttagtatgttagttgtggcacttgttatgtccttatctcccaggccttgataagatttaggaactaaaacagctgagatatgaatactttatccatggatacggatgttaaaatctaggtaccaaactttgtatgtccaaacagaagacagattttaataaaaagtcttattttattcagttgcatgtacggatctgtgtggatatgtgcacatggcctgtggagaaagaccgtgggtcccctggtgctggagtcacaggtggctgtgaaccaactaacatgggtggtgggagctaaacacagttcctccacaagagttgttcatctcttgcctgctgagccatctctgcagccccagaaaatgcatgtttttgccactcatttagttttaaagcaaacattgaccatatatcagattgtaaaaagtcttttcctgtcccaccagccagataccaaataatgacatggaaatatcttagtaattatgaaagctaggccttagcttaggtttgtcacatttgctcttataacttaaatttacccatttttactaatccatgttttgcctcatggttctttacctttctttcatcttgcaactcctgttgcctctccatctgactggtgattccacccttcttcccgagttctcttggtttccgtaagtcctgcctaacctttttctagctattggcagttcagttttttattacaccaatcacagcaatgcattttcacacagcctacaaataccccacagcattagatgaaactagttgagttcctcaaaataaaagtagtatagattatataattttggaaggatgaattgaaattaggattaaacatcaaaagtagaattcatgccctcaccacagatttacatacccatttgaaataacttagtagtttcatttctgagaggtctagaaaaatactgagactatcaaaacctacagtcatgacagaaggtattaaacagaattaaattaatatctgaacactttctatttatttctttttaaagaaagagtaaatgtcagttaactaagtacccaatttcaaattgagggggaaatcccacaaaatagaagcataaggaattacttgtgaattttttgataaacatagtttagttgataaatgaattataaattgtcaattaagaaaatccaagaaccaaataaaaacagacattggtactagatccagactcatgagcccagaagatgggggaaaaggaccgatcccagtgtcgatcacatgctggaaaagggatcctacaaggattatacctggtttgcactttcatgtcaacgaccccagtgctcacatgcagctgcaggaagtagaccaggacagctgtaagtgtgccagcctcctactctacacagcctgaccttccgagttgaccatagaactcccatgactaagcttagaaactgaccagctaggaccagatgctcccaagtctgaatcccctatttctctgaaagatgccttgtggatggtaaaattgtaggtatgctaaattcatcattttcttcatacaaaataagcaaattatcctgaaagacattttgaaagttgtcaagattgaccattaaaaacaaaatgaaagtgggcttttgtaggttgataatcaaattgcatcaaattttagaacaggtgattagaacttttccaatgtcttagaaagaaagatcttattttataaaatttcagcataaaaacatagtataaaaggcaatgatagtgcttcaagggaaactatagatgaaacatactttctaacatgaaggtggaaaaccctattaaacaccagcccatagggacttgaggtaccttaagacaattatacctcctgactccatgtgagctcattccaggaattcaagaatgcctcattatctagaaataaatgggcatatagcattgttgtagtagttccatgaaactcagactgtattatctcattaaacagaaaactgctatctgaccaagttattccacttatgattttaaagtaaaatattttctcaactcaaaaactgaaaatacatacttcaagttattaatgggacaagaccaatcaattatcctttagattttattcagctgcatttcattaatcctagaagtagtgtctattaaaactgaaaaaaagaaacacaaaaggcataaacatgttaaatggactttgaaatttttgctttcagatgatatgattctgagcggaagagctaaggaagctagctggagtgtgttgtaagcccatagaggagcccagtgcatgatggtggcaggttatgaacacatccaatgcagcttgtagaacctcagcatcctcagcatcgcagcctggatgtgtgtgtcactcagggaacagcccgtgatgacaggtgtgacggacctgtataacaaatgtcttcatatttagaaataataaatctacctttgtttaactgacagatggctagaattgttacctttgaatttacaaagtctaggcttagtctgtcaggcccctgaaacaagctgcaatacactggccctcccactgtggattggatgtgaagtgtctcgcacagggtcatgttcttggtccccatctggagatgtagtttgggaggctgtggagtctttagcaggtggagacttttgggggatatttggtcacactgtgacactttaagactgtgttaataaatttaatctcgaatcacaaggattagccatagtgaggacccaggaagacagacagagagacccacaggagggagtagggagggacttggagggacttggtttaggataggtgaagacatgctctcttgctgagaacctggccattttaaaaggaaagtcatctggttgcttcttggattctctgatctaacaggttttcaccccagcatctgactcccaagtctttattggtaaaatagaacaactcagataaaaacaacaggggcctttggaggttatagtctgggcctctgattcaaccttgaggtttgcttcttggcactctgtactacaaggagactctaccatgtgttcttatcactgtgaacttagccatgcctcctcgccttcctgtgacagactgaacccttctgaaaccatgagcaccttaagttgtttctgtcacagagacacagaaataatgcaaccacaaacaatggggactggaggcaggaagtgcaagatgaaggagctgacagaatgtgtgtctggttgtctggttcatcaactgcacttttcccctgtgtcccatgtggttatgggaacagggcagctcactgagacctttctaataaagcaacaaataccatggatatgagtctttcctcatgttctgatcacctctctaaaatctcatctctctctctctctctctctctctctctctctttctgtgtgtgtgtgtgtgtgtgtgtgtgtgtgtgtgtgtgtgtgtgcacaagcgagcgagcatgtgcaggcatgtattctgtattccgtggtgcatgtggagatcagaggataaactcagatgctggtggtcaccttccaccttgtttgtgagatgatttctttgttgttttctgcatatttcaggttatttcctgaatatgagcttctgaagattctcctatccccacctcgaaattccctgtcagaacactatgggttacagacacatacactacccaccctgcttttatgtatgctctgggggcttgaagtcaggtccttacacatgtgtgacaagcaactttacctatagggccgtcccttcagctccaatcttacttcttaatcctatcgcattgagcattatgtttcaacagaaaacttttgaggaagatacagatacacaaaccattgcagtaagaaaagctatatctatctatatctatatctatatctatctatctatctatctatctatatctatatctatatctatatatagatattggactttgcatgatgctgtgataggatgaggttgttgtgaagttgagagaaagggtatgtattttgtatttcaaagaagcatgagccctggaccattcggctctaaatcctaccctctaatgcggcgctaccgctaatgtacaagaagatagtaaattgtgatgggatgttactccacagttagattactagtatgttgacttgataatttcaatagaaaattctcttaaatgggtgttttaaaaattacttttcctgttgctttgataagataccccaataaaagcaacttaagggagaaagggattgatgcatctcatagttgaaggatccagtctgttgtggtgggaaagtaaagaggtcaagagcttgaagcaggtagacacatcccatggacaatcagatacagggagcaatgcacgcatgctgccactgagctcgttttctccattgatatggtccaggatccttggcaagggaatggtgccacccacagtggatgggtcttcccacttcaacaatgtaatcaagatgatgctgacagacatgcccagaggcctgtttccaaggcgatttgagattctgtgaagtcaacaatcaacagtaatcatggtgataggcctgtgtgaaaaggagtttcagacatcatctagactagcctgtctgtcatttgcacagggcaggtatggtgcgtaatcacccgtttcctttatgactcctttgtgactcccagaccagtgtcctttaattccctaaatagggcagttttgagcatttctcaaagagtagagatattctcttgttggctttgaaatgagttatgcaagtcttcagacactatgaaccaaattttgtccacgcactgaaacaaatgtgacaactcttgatggggactagcccagtccttcacttatagccttgtgagacctgagctgagggccatctgaggatttccaggacttctgatatgaccagagagaattgccaaaagctgctgtttgtggtaatttgctgccactcagccacagagcactggaagccacacagccttccagtgggagaacaattggaaccagagggggccgatttgctttgctttgtttgcaaacatatttttagcttttgtgttcatagcaccattctgttttcttcactccccagcctcccttctcccttccattctctccttgcctttgttcttgctgtatctctgaaaaattttcctttgaagtctctcttcctagtcagtcatccttgtatctatcaggatttggcattctgtgacagcccggcacattgactgaatagtttagggacactggcccaggagttgaaagaagtcatggaaaggagttcaccactagttagccagatgcatgggcatcacacctgttcctttccagtccaaaggatgtctgaaacgcctattctcacagatgctctgtgatcccaagagtccgaagtaccggagatgatggtaccaatgttcctggtgtgcttcaaggaaggatggcacagatggatgcaggcagtaacttgtcttgaacttgcagctgtctctcctggatcaggctcatgacattcttaaatcatcacagcctcattcgagagtcgcattcagcctgagagcgttggactctctcattcctagctgccttctgctttatatttcctgtggcattgtttcattttccttaccaataatgtggacaaaataaaaaagaacagatgccagaaaatgaagaatccattctgactgtaattctccgttagattagaaatggcctcaagaaattccaccaacgcctcatcagcaccactcgtttgagtcctggggatcatcagaggaataagacagaccctcaagtagatgacagtctagttggtcacggtttgttcatgaccatgaataactgtaagcaaaccagatttcaaaatgatagaagaaatttaatcaacatgttgtcaggctttggagtgggaagtcttagggctgagaatgtacagtgtttttcaagcactggccagcggtgaacagataagccatgttgagaagtgttggagaaggggaaagaatttggagagagagctgttcaaccacaccaacccttacctgtgggaaggtgactgttgctttctatttactgtgagcttagtgtgtgtgaggcagtttaagggaattgtgaggtagtgtctgagccaccctgagaagtacaaaaggacaggaactgagtctgtctggcttctgtgcagctgcagaggagaaaggggcatgggaatagctggtgttaccctcaggtgatgccaagtgtgactctgtgaccacacaagatggccagtgttgtttgctttcattgtaattgccctttaagctacagctaacctatccagcaactgccactctgctgagagcccaagagctgaagcctgagggaattctgttcccttaggtgcctattctttgaaagctactaagaaaacttatttaaatctctgtccctctaaagaaatcaagactcaaaggttggagtagaaccctgcttcccagagggggtgaataacaagcagctcacctccttgtgtctcccaagaagtcttcgttcggttgagttctccacgttctcgccgctccttataaacccttccccacccggcttctccctacaacttcctgctgacccagcctccagaccccagctgaattttatttaatcaaacacatctttgcatcattaaacacatattccggagcataaagaaaagtaacacaccttgaaataatatcctacaactggccagcagtgatgtcctgttcaagagatctgtagagaggcagctccaatctcagcagattgaatttggaggtgctggctaagtgtgtttagggccagaggagtagttctcaatatttttggtctcagaatgttttctgcctttctaggtaattgcagaccctgaatagttttggttgatggggctgatagcaatgaattctcactgtattaaactaaactaggataatttttaaaatgttaatttacaaatccattttaaaaccacaccagtaaactcattatatgttaccacaaacatatttaaatgaaaaagatgacaatttttcgcatgaaaattactcaaggaggagtgattttttttgcatttttaattcaaattttcttaatgtcttactggaagacagtagaattctgctcctgtgtttaatgtaatatgttctttggttgaaatgtaggaagtaagttcaatgtgacaaagattaaagttagaaaaggatatttgatatgctttctagataatcccaggcacatcatttagtttatgaataattatactgtgtacttatgagagaaaatgtgaaaatggctgaatcaaatcttggtattgtgataatgggtttgacctaactaagtttgtgaaaacatctcaggagttcccagtctccattactaagttctcagtataatgagggtctcaaactggttcctcttttccagatattttgtctgggctgccaccaagaaggtgccactcaggtttagggtggcagcccagatagaaatatctggaaaaggggaactgttgctttttgcctgcttgatttcaattttactggcaagtcatctaccctaccactgctgaattcctttgctgatattagaaccggctttttcaaacttctaacatatatcgaagaccagcagcactccaggaaacctctaggccttcagtgacagattggaactgccaagacatccagactcttggactgagcaactaattacctcttgggtatgagacagctactgttaacctactggggccatatcatgcaagccaatttaataaatccctaataatatgaatttactttattaattttatttcactggacaaccctgactaatacagcagcattttagctaatcatcagagggttctttggttatctaaatttatgagataaggcaagataaatttccttccttccttccttccttccttccttccttccttccttcctccctccctccctccctccctccctcccttccttccttccttccttccttccttccttttcccctctctcctcctttttgtttgtgacaggatcttgctatgtatctcagggtgaactttttatcctttgccccagtctccagagtgttagtattataagaatgtgccaccatgttcaactgaattttcactcagtgacctgaaaaggagcaggaggagggaaaggaagaggagtgttgctgggtcctaatggatccctcagggctcctagtcaacagcaaagaacctgggaatcagataaaaggcaaacagcagactcctttattcagcaatagggaaagccttacataccctcttcccagccccaggttgcattccaatctgttgttttttcgtggtcgcccatcattggctagtcatgatcaggacctcagacagcacctgttgctaggccctcaggcagactacaggttggctcatctcttggccttgtaggtcttaccttcctacataggaggagaaagcattcattgaaaaatgcgtagagagtagaaaataaaaataaaatttcctgcttagcatattggttaaaattcacattaagaaaataaaatgaatttagttgtattgtttaggctgatgtacgaggaaacacgctcaactgcatgtgactgcatagcctcatcatagcataaatgcaccatgacctcctctaaactattctgctgctcaagagaggaagaacacagaaagtgatgcttgtcattccataatttctatgaagaggtgcaaataatattggcatctgatgtagccttgggagaaaaggctcattggtgcccagataggattggggtcttaacagatcacttccatcacttgtgctcagcttcaattctgaggagttgtgtgagccccaggagctgatggctctgagctgtctcactgcccatcacccccatgatatttgagactgctggtgcctaggaggggctggcatgtttaacaatgctgttctctggtcttagggcattattcatgaacctttcaaccaccctcccttcagataccaggctcactctgcagttctgcccatgacaaacctcattctgtagactgcaaaagaccttcccgaaggagaacctactctgtattgagttatacatcgaggcaggcagtctctcatcacatccctgagtttcatttttgtagtcttcattctgcctctgggaaagcactccattttgtttgctgacaatagcctcccaaaccccaagggtctagataaaaggagtctcattacagctactgagacaatcagaaggcccagagatgagcagatcaggaacattagggcatctggtcatagggcacagagagaagtgccatggtgtcaccctctagggggctctcaatgggccatcctggctcatttgcttgaatagctcatggggcatgatgcacttgcaaatgacctatgaggctctgcttcctctccagagaaaatttgccttctggagccagtgaatgtgaagagttgagggatggggaggatgggggtggaggacttgctcacatttgctattttataccaggctctgtgtgtacacagccctaaggaaattcttcgaggctaagctattccctatccccaaaaatgcagataggggcactgagatgtactgaccagcccaagtcaccactagtaacacaatgtgactgtggtacccaggttactcttcctaccctgtggtgatgccttcactttctgctcaagtacaccgtgttacctacagctttgccagttattttgttcagaaggaatcatctaaaaccaagaagaccaaatcaaggattttcttctgctttagtactctgtagttgagggtgttatctttcatggttgttattaaatttgaaaggtcgtagaggaagaaaagttggggaatggctatttttgtaaattgattctgcttgtttccccaccccctgcttaggaagaagagatgactatgtagagaaattaaaatcctttttctttatatttctttctcgtcttttcagatttctctacattttttaatgtaagagcatccacataataaggaatatccgtgtagccatcaattctcctctgtaggttagaaacaaattatccctaaaaatactcaccccatttctttcctacttgtcccccaaaggagtcaagtcatctccaggctccagcttcgaattaagatctgattttagctcttaccaagcagcctctggtttctaatgagatacgcaattcctagcatttagatttctcttctctctgtccacttacccatcgttctaagacagaggagcctccttggtggccatctttacagaatgtttcaagagctaatgagccaagaaagaactgccactttttagcttctttagggggaaaagaaaggacagccaatttcttctccttcgatgtatttttagaatcagaggctgtcttatcattctccacacagccacatcctcgacagactctactccagggttcgctgaaggatagaaactggggcatactttttaattgaatactgataatgggaaaagattcagggccgttcctccatattggggaatcaaagcatcattaactgataatggtggtaataaaacacaattggtacatcccattatcaatcagcaaggagcacaaagtgataacaagttatttcctatatttgcatgcaagttgtttgtttacttgggggcttcccagcaaaatagaaggatcgtacatgttcctgtaaaaaaaaatcagaggaaaaatgtaccagctctgcctttgatccctgcttggccttcgaggcgtcatttctcttctggaagcctttcttttctgtgtgtagcatggatactagtgaaggtccttatccctgttgagtactcagagcctgaggctgggagatgtagtgtagtggtagagtacttgcttatcatctgtgagaccctggattcaacccccagcatggcccaaagaacaatgaatggcgcctggcttgccattcattgaactgtgtgcagtgacaggctcctgctgcttctgctaacaattgtcttggcaattgatggaatgaaatctgcaagatgcccttctaacttcctgctctgcaggccaggaaatgccatcggcagaagagcgtagctcacagcaaataggaccacaggcagattgcctggatgctccttccagtaagaattgtcccagctgtaggggtgtggttctcaatcagcttccagctgtcagctctgcctaaaattctcgatccccagggcagcctgcctctgccctggggatcgaatgatagcagtgggcattaaggtggcccatcatgggacaattctgatggatcctgctggttcctaagatctccacagggcaccaaagccttatgggttctaactgagtgcttttctagtgacaagagctgagatggggtctttaaatggctgtgtctggctaaggaagtaaacaaagccttgtttcctcctgcagagacagaggctttaccaaccacagggaagtaaaggtgacagggatggtggtagtcacagtcatatttctgatgctgtcagccaggtttcttaatgttggagattttgtgtgtgtgacagagaatgaaaaaccggcaaaaaaattaagatttttgaaaatctcaaaagtgtgtgtgtgtgtgtgtgtgtgtgtgtgtgagcacacatatagaggttagaaggcagcctacagaagtctcagaggtcagttttctccttccactacatggatcctggggacaggatttggctcagcagccttagtggaggtcctttacctgccgagccatcttgctgccccttcttcagtgtttgcatggaagcttgttccagtttcctcccgggtggttgcctggacgttaatcatgggttagggtggcgttattggtttccttcactgtgaagcttcgtgcttcttagactgagcagctaagggctaccgtgactctctctctcctttctttgggcattttgggacttttcagcctctgtgactctgtgagccaatctagcaaatcctctcttgtatcaaacacaattaattccattcctctggagagtgttggctaatatgaattgaatgctaaaatgtgtttgaaataaaaaggagtgaaaggttttcaaggacaaagataggaccaactggattgtgagcgcttctgattaggaaacagagaagaaagtgttggggtcccatgtctaggaagggactgccttccaagaggtgaaaagttactataggacaatcccaggaggtgttttttgccttgggggctgtgatggttaacactgattggcaacttgatgggatttagaatcaccatggaaacaaacctctggacttgcaattagggaatatatggacacttagttgaagtgggaagacacaccctccgtgtgggctgcaccactcctcaacagagtcctgggctaaataaaaaggataaagtgagccgagcagcagagttcatcactccgtttcctgacggcagatgcaatgtggccagctgctccggggcctgtcaccatcactcctcttgcgtggcgttctgtaccctggaaccataagtcaggacaaaccctccttctttacattgctttgtcacagcagtgagaaaacacaggcaagtttagctttcagaaacttcagtaacagaattggaaaactataaaagctcaagggtgtgttttgctgtttcttatccagtcttgacagtctcctttattggttctggtggatgggcccatagtcctctggttgttttgaggtgtaggttcagtgtcttctacagccatctggacatgcattggaagagcagtttctcttcccacatcaccgagcaaccagaatatcccaggtcatctatcttagctctcattgcagaaatgatcttctaggctcttccccactctgggtgactttgagggagagaagcttcatttccagaaggatttcttctgtttctagtgtaattatatttgtgacaggaaatttaggcttttcatgggatcacaaaactaaagccaggcaaccaaggtgtccctccttcctgtgtgtgggtggtctgtgtgtcagtgtgtgtgtatgtgtgtctgtctgtctgcctccctgtgtatgcctctgtgtgttcatgtgtggctttcacagagatcaaagaacaaccttgggtgttgttagccaaacttcagctaacttgtgttttgagatagtgtctctcattggccttggacttgacaagtaggctaggctggctggctagaaagtctcggtggtcctagtgtttctaccttcctggcactgggattatagacatgcaccacaatacccagcattttttaaaaatatgggttctgaggatccaacttaagttcacatacttgtggggtaagtcctttactgtctgagccatctctctccagccccctttcttgcctttaatagctagaaaatctagagctataattattgcccaactgtaggaaatttgttccactgtcactcccaccagcaccaactatgtcctctctttcctgcagacatatttttgttctgcgtttaaatgttccattgcatctttgtgcagcatattagaactgtgagctggcttcatgaccttgtagagatacacagtatattaatcttaaataaataaagataaggcatcttcctcctcctcttccaaaatagaaaaatagccaggatggcttattggagagataaggaaacggaaagtttgtgaggagagagaactgaccatattgaagataagtggtagccttctgtagattgagatcagcattcacagagagcccagaggctcttggccccaaataggataaacttacaacaaaattgcctttgctaggttgcttctgggacaagaaaggaacaccattaccatctgacataaaaatgtccccatccctgccctttttgatttctcagatctgctggtcagtagccccctccagtgtacctgcagaccccacctctttgctgtggatggctatctgtctgaacattttggacctgctatccctccttggtgacaatcagagtatattgatatctcagtttttctctcacgtggaatttctatttttagtcccatttcactcggagaaaatgctagctcacatttcccttctttggattgttgacctgtttggctagataatcagcattcagggcatccgtttaaattgtgtccacttgctatttggcagcttctgtctgagtttctctgtacctttcttataagtaacaagatgtggtctagtgatggaatatactcagccgtcggcatttgtgtgcagggggaggcatggcggccacttgagttgtgggaagcaaagcatattgaggtgggaggtgtagacaactttcaaaaggggtccaaacatgtcggggacactgcattgttcccactcacaatccacttcttttaatatcagatccaccaagcacgttctgccaatgagttccctcatcttattgtacctgctatcgtggctttggacactatttctatagaaaatgttacaggtaaaatgatgagtaggtatacccaattgctagggctttcatgttaagataccatgcaccagctggttttaacaacagaaatttattatcaaattctggaggcaggaagttgaagaggaaggggttggcaaggctggcccctctgaagcctctccgcttgtcttgtccttttgcagttttttcacgtgatcttgccccatatacaggcaacccttgaatatcctcatgtaattgactctcctggcagttataccagttaggtcagggtcttcccaaacagctttgtgtttgcttaagtatttgttacacgttttaatctcaaatgaccctcaaagcccacgtgataaagtcaagagcagtgccgttggataataaggcagtgaaatccttaggaggtaggacctcgaggaaggcctattaaggtcatgccattgcagacaattgcaggacttcgcccctttctttttctcccttttcacttggtttgagacataagcagattcgttcatctactgcagggttttagccccaccaagaaaggttgaactgggtcccaggaaggttaagtgcactgcttgcaccattccccagccttctgggatcacagagacactcagacacagcaaggaatctagtcaagcagttgtttattgccccacagcaagtatcttttaaagcaaaaaaccacagagcagggtaggggagggggcgggtacatggatacagccagccaatggtattaaaggtcagcctattatgcgcctaggcaccctatctatgctttacctagtgaacatgaactgctcatgcagtgacctcatctggttctatcttgggaaccaatcacccttttttgtaaacatctcaggactcaccctcctgacttgccctcggcaccatctttaactggctcatgggcccttcaatctagcttcttggaatcccagagttgtgtcccccatctagcctggtctgggaactctagagctgtgaaccaatattagcttttcttttttaaggttgattacctcaagtacctgcccctccatgatggactgactgtattcattcttaacatttccccctttaagttgcctttgtcaatattttgtcatggaaatgaaaagagaaaccaatacaagccatatttgcatttattatttgaccacagtcagattgggtctgggaatagcaagataccctgtaatacaagccaaagttctagatacattcctttctgctgaagaggaaagccatgaccacactctgtaggactatttttcatgtactagtgaagggaccagctccccatttcggcagccatgacagtaacacctgctttatgaccttgtcttagtcactagaggttaggtgcctgcctcgtgacaaggaaccaatcagaagttaactggtggcgctatgctttacgaccctggatgtgctttacggacaagtacacagcaatgacccacagagcacagcaaccaccctgggaggacctatgggccataacaaccagttgaccaatcaacacagggcaatccctccaaggctggaggcacaccaatggtgagcctgtgcgtacccctagacactccccttacgctgccctacaagatctgtacgaagcaggatcgagctgtctttgctagccatccgcaatggcgagtgggtgaaagacccgcgctaacatggggttagcttgttaaattacaataaagcctcgtgtagtttgcagcaagctctcgaatccgcctggtgattgtggtgaccgtggttgtggcctgggacccggatacctgagttttccgggggtctaacactagggtacccaaggtctgggtcatactggcctttactggacaggtcattccgcctgcctgctggttgagcatcccgtcacagtggatatctgctgatagcattaatgtgcgtgtgagtcacacattgtcttagagtttatatttctgtgataaaacaacttgaccaaaagtggcttggagaggaaagtgttaatttcatagtacacttccagttaacagtcagtcactgagccaaatcagggcaggaacttgaaggctggaactgaagcagaatctatggaggacaacaactgtgccctaaaatcacaaggacaatccagtaagcaacaaccatggtcactgagtttattgcatgtgctttgctcaaaagtggcttccttggttcaaagtgatagtctgtgaatcccatttctacagtcaggaattatggaatcacattgatcatggtttctgttgatgtcaagtagtctattgagccacattggctttgatgagagggaggcaatggccacactctgtatagggttatttttcaagtactagggtttattccttatgccttgtccatctggcttccttatacagctcaggatcactgcccaggggtagcaccacccagagtggtctgagccctcctacatcaatcattaacaataaaaaaggccccacaggcttgcctatggaccagtcttatgcatgtattatctcagttgtgttttccttttcttggataacttcagcttgtgtcaagttgacaaaaccaaactaaaccaatcaaccaacaaacatagaaagacagacattgtgttcacataattccacttacaagttttttttccagactccctttgtttctgaacaaattttctgacaagttagctatggattgagcagacagtggcttctgtaggtcctgagtggatgaccagaggcacacactgcagcttacactactggagggtttcttcagtcactgggtcttagagccatgcctgaaggcagccacagtgtaacagtgatctttacctctggctcacagcagcacactcagctgggattttgtaaatcagccccagaatctttctatccatgtcaactggttgtagagaattctgtagtagagcacgggtgtcagctgagtgagtggcgttggtgcagtggacaggtaatgtaggagcttgaccactcgttcatacagcctatttgtccctaaccatggctgatcacagctacaccattatcggccattgtacagaggcttgctggtgcgcctgcatggctgcttgcgttgcttggtctatactcacaaccagctcttgatctgagagctctggtcccacagaagcttgatgacctaaagtcagagttcagtctctgcaaagatacaggagtcttgtaggagggcaccctcataaggacttgttctaaagtcctggaactttctagaaattccaagagaactttgcaggtgtctttaccacatacactactagcacccagggagtctgccatccctgttgtagagctccaaattgttatgtttctgcatctactaatcagtaagttaagggagttctgcctaagtggtaagagtatcaagattccagacttgctttaaaaaaaaaaaattgggcaagattttgggcatgtcaccaaaacctcaccaatgcagtagatttcttaacttttgtagaacttatcacccacttttatatgtaacatacatatcagaacatcccaagtacatggcactttttgccctagcaggtccaggtatcacaatgtagttcccatagtcagccagcatgcagctccttggaaagcatgaatgaaagtgctcttcggacaacacaagaaagacagcaggagtcacatgaagccctggcattggaggtgaaatggcagtcagtatctgcccctaaccacagtgtctgggaagctgcttgtgttgtctccccagagaatgtagaaggggagtcctgcggatgccgattccagctcacaagggctgaactctttgtgaacggagactcctctatgtgcttctcttctgtggttctcttttgggtgtggctgtcagtattgattagaaagcaagaggtggaccacctgaattggggagacccccgactctctgcttcccgtgggatcggatcattctaaatgtcaagttttttaaacagacgaaacagttataatggcacaccacaaaagcttgaagatatagctattgttatatcctagatgatattaaaaagcaccctgtaacaccacaggacatactccagagggaacaagcgcttgcattctttttcttctctaacccattttaccagccccacgttatttatcgtctcagatagggtctccttgcctgtcacgaacactaataagcttaaatttcaagcagaatttaagctgcacgtgtctattaccactggagccattaaaaatcgaagacgaagctgccttcttataatcctttcaggcctctgtttccttatctcttctacccatgtagagctgcatcctaagatagacagaaatgcaaacagaaagtgaatctatggccaggcgcgtgggaaggacaggaaaacaaaaagctattatctacagcttcacattaacactgacagggaccccagtggagtgtttcttgcatcacacagctttaggaaagcaaatgcctttgttctgaacttttgtctaatcttggtgactcagctttaggttaagaccggtgtgcagagagccttggatggttacttatcgtggatccaatctaggtggttgatatgtaaaatgagctcccatgtttatcctttcatgaactcacccaaaaactatgcatgagggacctgattctgagaggcacataagaacaaaatagtccccgtctccatggaacattctctttaggggcgaaggtagacgaagcagtgggacttgtcattcccagcgtgtatgctgctcttgtcaagagcccatccagaagtgggcttttcaagtgcactgtgtggtttgattcagcagcttcccaggtattctaggataaacttgtggtgagaaaatgtcattatgctaattcagttgctctattagtctgccaagtttccatcataagtgtgtcctctggagacatagcagctggaataatcaaagaaaaatagcaaaaaccagtgttcctgcactgtctgagtgggaggcaatacaacttcggatgaaatcaagactttgctgacatctgtgtatcttcctgttgagtccttcaggagagctcagtagctgttcaaagatcttctaatttatccttgagacatgctcatatgtatgaaccaactcctcctctgcaagtttatttcttctatgacacatttctttctgagttggccttttttctttcagctttttataaaaacttcctgtgactttatatctcagccttttaacaaacacctagaacaccatgcccgtcctttgttctgagtctgtatgttctgtgctggtgtttctaatttttggtcttttgtcctgatcctgtgggtctcacatattttgtccttctggattagtatttcttcaggctggattcttaaacctcagctatcactgtgcctctagataccatcccagggtctctctttattccaccctctatttaaacctcagtactaagtccagccccttccctgattccacaccagggtcaattcccacagctctcacttagaacagaggagcttgaacagtttcagttgcacttttcttatttgttaaaaggtagaatcaatcaacccaatttgctcaagcattaaatgattagggcaggcatagtgtataatccaaaggattaagatctcccttttaacctgggctaattctagaccaaagcaatgagcattttctagttgagtttctgacagtaagactaattaatagagggtccaggcttgggaagaatgcagacttcacaactgagctgccatgacttttcctcatgtagttgtctctaaaggagagtttccaaacatggatctacttttcccacagccttggtcatccagatgttcagtttataccaaaggatccatccattcaaacacacattttagctaacaggtggaaatatggtagacattggtttacagacagtttgataggtatggttttgtgtggtgattggttggttgctgttgttgttgctggtgtgtgtgtatgtgtgtgtgtgtgtgtgtgtgtgtgtgtgtgtgtgtgtgtgtgtgtgtgaataagaagagacaatgatgggactgaatgtaatgacaatacttgataggtatgctttgcctgagtgtgatcatactgattctctgctgttacaccaagtggaaacttggatgaatgagggtgtatctttatcctcccccctccctctcttcctccctccccctccctccctccctcccttcttccctctctcccttctttccttacatccatacatgcatgcatccatccatatccacccatccacccacccatccatccttttctcatactctgaatagggtctggcactagatcagaatttagtaaatatgagcagtctgaatgaattaaatagtagaaatagcctaaggttatatggaacctaagtgatcttctagcttatatttcacaatctacagagggagaggagtgcagctactaaatagtgtgcgaccatcacagcttgatggcagattagagattaaaccaagatttttctgactctatccagggcttgtttctcttcacttctctggatctgataacttttttaaaaagtggtttgccaaatgattaatcagatgagccaagatgaagattgactttcattaattaacctctaggagcttaaaatctggggaattttaaaagacattgaaaacagtacaatattttaaaattgctcattttcttgcaactgacatttcattagggatgtattctagaaatactagcatcttctgcctgaattgcttcctggtgctgttttatattgcttcctaagccctggaaggtggattaatggcctctgagtgacttgacattaacagtttttcatgacccacttttgtacaaaacatcctactaagagtgagggagaaaaacaggaaacaagtggaggaagatagctaaatggagaaatctattaatggaaaaagaatgtttgagtttcttcattttaaaagatattagaggaactgcaaaccaaaatgagacgatgtatatagtattcatagaaaaaggctgaatagaaatgaaagccatttcaaaaacattctgtgcctttcctgttggttggagtggcttgggatcaaagtccagtgatattttctttgggctaaacctcccctcccctcatatgtggaaggacatttataagagttatttattgtgtaatatgtacatgagagcctagaagagaatgacgattgagtaagattttatttctaggactgttctttgaaagatactgttatgttgttaaaggctagctaaatcattatataacactgagaggggtagcgatatctcaaaatttggggattgaaacaaaaagataaatgcaagctatcaagaaggaaactctggatgggtgctttctaagacttgcttatttccctctcttttggctgagatattcttttggtaccttcttcttcctgtgatagggatggaaccagagcctcacagtgataggaaagtgctctatagttgagattaatccttgcctttcttggaatttctgttattgtcattgattcataattaacttagattcaaatgtgagaatataaaagatgaaaacaagactaacattatttttccaaggaatataaaatataaaaattgactttaacgtcttagtgtggtggtacatgcctgtaattttagcacttcagggatacttttgctagggagacaggaataaacatctactcacccaaaaatggcattgatgacagattgaagaaatgatttcactcaagtctattgtggtgaaccagtgagctcattttacagtttattcacaggagtaagtgtggggtgggcaggagttacttaaaggaacatgagtaactcaaaggcagcagcatcactgaaaatctcactctgacacgggtagtgacttattaaagcagaatccttgaatcaccctgcacaacctaatacaacccagtagaccagagtttcctctctatagctgttactgctcatatgaccttgaggggggaaaggaaccttgtgaatctagcaagtttcagaagcttcctgaaacttgtgagttgtgtttacttcctgagtcttaaggagacaccctcctccttccaggggtaatggtttgattcaaaggaaattgctacacaacaggaaacaaaggcttcccaaagaagaccacaagttcaaggccagtatggactatatcatatgtccaagaacacagtgtgctatgaagtgtgaccctttcttttctcagcaaacccagatttcgttggtaattcaatggaagagtgatgacttagcccacacagacccgtgattttatacataatactgaaaacagaaaaaatgaactattattactattaattgttaataattagcatggtaattctatttcttattttcttcagataaatggttttctaaagaaatggatgaaactgaaatatatatatatatccagaacaacttcagtgatcattgcttatcagtagcttgaagatgaaacttgtttttccgttgactcttacaagttctgatgacagactgagtttgtcctctggcttgtacatccacctgtacacatgagtaaacctgtactccctaccacacacagagataacctgaatccaacctgagcttaagtaaacctaagcccaaatttacgaatttatggaccaaatataaagacaaaagtccccaaggggccaactttgtttgactagctttcttttttttttctctttcatataaacattattccaggccaggctattaaagacttacatccataagagagaagactagaaggagagtgaccagcgtttaatcctgagatcaaacaaacaagccctatatttatatttaaacccaagaaagccttgagagatggtttttaagacatcagcgtggacacctctcctacccagaagaaagacctcaagaaagaagcctgtgctagtacctttagaatgctgaaagaaaatgattcccaacaaaggtttatgtcttgatattgaaggaaaaatgcaagcctgcagttcagccatatttgtaacaatgtatgttgaaaggaaaactattttatagtcagcccagagttaactggaacattagattagctaaaatactccaagcatctggattaattaaattttcagtagaagagagatacttataaccaaatgggccatttgagtacacagtggggttcaaagcaggatgtactgtgtcctaaatttgaataggaaacaggcaggcaggtgctgaggaagattctggaagatacaaaatggggtatgtaagtgacatcatgatcattagtgaatccatagaaaatccatacttaggaaaatataccagtcacggtccagtgagaaaaattcagtgagctacttaggtgtgaaatagtgaagtcatatggttaagattgatagatttatttttaatcccgagtgaaggacttactagctttggaactggattgacagaaaattgagtcatgcattaacactatcagtaatctaaccctcagaactgtggtagagctgagcttctccctcaggtaggtgctgagccttgctactctacatttgcctttacaactctccaaacttttctcctataatctgtacaagaaaaagtaagactgtcattattgcatgttcaaaagatatagagttgacatcttttgtttctctaaagttttgtacaagtttataacaaaacttgacatgtatagttactctttgatttcagctcaaatgagcatggttttaggaaagatagataggagggaatgcaaaattggtgtctaattgtcctagttactgtcctaatgcgatgaagagacaccgtggccaaggcaagtcttacaaaaggaagtgtttgattgggggcttgcttacagtttcagaggattaatccattatcaccatggtagggaacatggcagcatgctggcaggtgttcgagcagtatctgagttctacatcctgaccctcaggcagtaagagaacctgggcctggaatggactttgaaaactcaaagcctatccccactgataactcatccagcacggtcatacctcttaatcctatctaagagttacattcattagtgactaagcattcaaatataagagccaatgggggccattcttattcaaactgaatgaaaatgaggacatgaccacccctagatatggtcaaggagaaggattttattgtagatatgagggagagttcagccagaggcacctggaagggtctagactgaaccatgccaaggggcgggggagaaggaagagaagaggagaaaagagcaggtgaaccaagagagtatcctagggctaagaggatgaggaaagcatgtggccaaaatggcagggttagataggcaagagaagatgggggaagggaagctaagcccagcccctgggctggagagtagggtaggggtggggtgagaagtgctgggaggagccacagctactgagtgagccctgtcccaggtttctttgggagctgacaaccaccacactaacattgacatggtattaagaagctatagtctgtttgattgacagattaagatagataaccatttctctcctgtatagggaccttcccataacacatttgattttatccatatgcatgccatatacataggcatgatgatagacatgaaaatctgctttgagaacacggtttacatgaatcccaaacttgtgttccaaacttgacaaggttggatcaacctctctactttcatggccagaggtaactgctgtgcaaagactagatctaagtttgatgagcattaaggagagagagcactgtccatgcagcccaatgcaggtgtggggtttctaagttgctaatgggttctaggtgcattgttggagtggagtacacagtaggtgcaaacaaaggccccagactgacaggtgcaccattagaagaggagtttgtgcataccccaaatcaagctattccctatgctagctagccttgtggaaggacaagagggactaggtcataactggaggctttgggataatcatatttgtatttctggtgtatattgtagaggcagagtctggaaaatgacagcattttttagtacctctgaatgaagagtttatgacatgagagctcacatataattattactggcacaaggtccttgttgtctacattatagacagtatctgaaattccagtttgatttccagctctccaagcatgccttagtacagaatatagacacttcctccacatatgaataaactgtagagaaaagctcatttgtctctgatataattttcattgtaaaaaaataatattcctttgtaccacacaaggattgcattaaatgctttcaaagacctttaataagcagtaaggccagtcagatcacagaaaaaacttaaatttagcattaataaagctattaagcatctttcctgagaaggtattagtattcaaaacatgtaagggatccatataactcaatagcataaaaacaagtaacaccattaaaagcagacagcagatatgaatggacacagatgtgcactagcctttgaaaaaagtgtccaaggtgtgggcttgcctcagtgtagatgcatgcatgaggctctggatttaattcccagcacaggacaagaaagttcgcaaaagtgataatcaagaaaatagatcagaaccacctaacaactgtttaagatggctacttctttttaaagtcttgatgaaggtgtggataaaaggaaacctgaatagactcctggtaggaatgtaaattgatacagattttatggaaacagtacggagttctaaaaaaaaaaaataagaggaactactctgtgttctagcaaccccactgctgggtaggcatctaaaagaactgtagagatgatctggaagagatgtccatattcctatgtatatcactgcagcaccaagctagcaaaacattatgaatgtccactggaggggttgatgaatagcttcataaaatgtcctacatacagtcttagataaataaaatcttgtcatttgtcaccatgtactgacctggaggacattatgctcagtgaaacaaaccagacacagacgagttctatgtgacttcactcgcatgcgacttctcttacttgggagatggcactctgaggttgtagtggagataatgatgcccagagttaacaagactgcattgtagacataaaagccagtgtgggatatataatgaaatcatgtctcacaaccacaagcttgttgggagatcatatgttttattcttaacagcaacaatggaagaaataaaaacaaaaaggcaaagacaagggaagaaataaagacagactttaaaatgtgttggctgtgtctctggctgtgatgatataaaaatattaacagtacatgcttctctccaaattgttgtctatttggcacaagtacagcttctttatgtaaccaaaaagagataaaatcactatgctctttatttaaaaaaataacacaaatctcatggctattgtgtgttttaacatgagtatttttccctgcgttacttttctgtcactgtaacaagtacctgagatgaccagctctcagaaagaaggttgatgttggctcatggagtcagaggctctggtccatgatgtatggccctccttactttggggcttgtggggagggaggacatcatggtggggtctaacagtcactgttcttgatgtgaccacatattcgacaaaaagtaacctaaggaagggtttattttcatgtatgttcttggcatggagctcatcatggtgggggaggcatggaggtgggaacatgaggtagctggtcacatgacctctcctgttgggctgcagagcgagatgaatgcttctgtgcagccttccttcctcttttaccccactgatcagtccacagccccagctcctgggatggtactgctcatcttcagggtggttaaacttctctgaaaacattctcaaagacacccccagaagtgtacctcaataataggctagatgcttctcaatccaatcaagctgacattcaaaatgaaccatcacatgggggagtgcatgacagagcaacttcaaggttacaaagtctaggagaaaaagggataaagtctcaccatctcccataaataatttttttgggagtctgctgttggttgaatgtatctgtctgaggacaagggtactcagtgtgtcaggggagactcagtaggtggaatcttcatcctaggggccattaaaacagctttagtatcagtgtttaaaaacattgattagtgccaggcggtggtgacacatgcctttaatccaagcactcgggaggcagagacaggcggatctctgtgagtttgagaccagcctggtctataagagctcgtttcaggacagcctccaaagctacagagaaaccctgtctcgaaaaacaaaaacaaaaacaaaaaacaaaaaacaaaaaacaaaaaacaaaaccaaaaaaacaaacaaaaacaaaacaaaaaaaaccccaaacaaacaaacaaacaacaacaaaaaaaccccacattggttagtgctgggtggtgacggcctgcactcgggagacagaggcaggtggatctctgtgagtttaaggcagtctgtctacagagcgagttcaggacaggttccaatgctacagagaaaccctgtctcaacccccacccccaaccaaatgattagcaattagttgaagccctctagttggttttcttttaatcaatgtctatgtaaacttttgttaggaggaaaaatggttctattgcttgcaaggttagtgaatcctctctgtgtaactcaccaatatggcccttcccctgcctcatcaaccagtgctcctgctccaggctactgtggatatagccgtcttctttaggcgctctgcatgccaccaactgccttttagcatcctaaagttagggttgaatagtgtcatcccacaagaccttcatgccctaacctcccggagtccaagggactgtgacctcatttagaaatgtaggtgaagatgacctttgtaatacagcatcgctgtgtctgtgtagtaagggaacatctggacccagaggcaggcaggcacctagggagaaccctatgtgaacacaaaggcagagatcagtgtgatgctgtcctaagtgaagggtattagtgatcacgagcagctggcagagagagaggcatggcaccaactttccctggcagcccttgggacttagctcactgttctgactcctctgttccataccccaaaactggagaagaacacacacggtgtgatgtgtaagccacctctcagtttgtgctttttttcttttgctaacccccttaggaaactaatgcaaccagcactgcatccctgagattggtttcagacatcagctgcacacaaccagctctagtctgtgatttttttttttttaaccaacaatgatctcattcatcaagggtgggttttttctttaattagattcattccaattagcagcctcatttctaaactcttgtggggttacagagtgcacatctcatagattcttccttgtgttatcaacaaagcttcccgtgtcatggattgtttatctctaaaatgatgaagggaggaatcagtgagaaaaccaaatggcaagctctcaggagctaatagaaaaaaaacaaatagtatcatcatgggttcaggcgtctgtctagatgaggtccccttagacttttcttttaagaaggagatttgatgattaccagcaaatatcaggagaacagggagatcagagacttcttaatcatttaatatccctggtcttaaaccagggagtgagttgggaaaataaacctgacagtaggcaatgttggaatgagttagggcaagagtaacacatttttaattaccagtttccatgcagaagtagctaagacaataaatgctggcaccctgagatgctagctcatttgcattgttttttaagaaccttggcagtttagaaagtcttccagtaacttactacacaagaaatgtgtaacccccttcaggctgagacttgagaacttttcctcatacagacttgagtctcagagtatcccagtaagctcaccatcaaatccaagaagcccccctctaggtattcttccctgggtcacaaggatctttgtgttgtgctctcttgagcactacgtgatcatgggccaaggaagcgcctttgaaaccacctccattctgtttgccaaggctgtaccatgtgctttcatttttatacctagttagttctccaattcacttctgacagcctccaccgtctcctaagagcgccatcactgtgtcccatttattagggtagcagtaacattgtaactgcactcttcagtcttccgactctattcagagccctctcaacctggcaacactgtagcctgaataaatctgactctacactacctgcatacagactcttaacgccacctaaaatgctgaaattgcttctactgatttagtcaaatatttactgggtgactttactctaaggagctggagggaacaaacaaaacaacatggtccttgggtctgtcaagcttagctagaagtaggtaggaaagacactactaaacccatatactttttctgtgtgtgtatggatctgtgtaaaatatgcatgttcatatgtgtgtatacagatgtgtgtttgtgagggggggtgcgcgtgcacacatgtgtgagtgcatgtggaggccacagcttccctggttgctttctaccttaattttggagatctctcactgagccaagagctcatccattgaactaggttaactggccaatgtgctacagtgatcttcctctcttcctcccactctctgcccagcctttaccccacccctcccccgcagccttactacagcactgggtgttacagactggaactattgctgctttttacttgtgttctggggtctgattaaaggtcttcatgcagcaagaagtttactggctgaaccacaagcgtctgaactctatatctttgtgtaaaaggaaaaggtacagcaggcataaatgctagggagaagtttataactatgggaactcatgttagatcatatcaggtaaaggggtataggttacaagagaccacatggcagatggagtgttctcaaaatcatcccgtacgtgagggaggaaggcttgttggaagaaaagaaagaaagatagcatggctggtgcccatagcaggcaatatgtaaaaccaagtattttgtcatgtgaaggcttttgatctctgtctaagaagggataaggaaaccgtgagagacagatagtttactaggggagtgttcattggtgcataccaaatagcaggaatctgatagtgtttgactttggaaaagatctgcctgcttggtagagcatttcagaaatactctctgtcacttgtagctatcataaaatcagacatatagctggtaccaaggatgagaggaggtggccaatatgggttttcattttattgccagctttgtgctcagtgttatccttcagattttatatagctgaacttccagcttttattcttgctggggttggcattaggaagacagccttgtcgtagaatttggatcaccttcagcagtgactttcaagtgtttgggaatcacaaaccaacttaaatcaaagctttaggtaagtaaactttgttaagaatcatgaggaatttgggatacagttaagatataatatttataatatttacaatttaaaattaaataacattacaagaattaatgaatattcccgtacatcagtaatgatgatggctccaagtttcacctcattgactctctttagcttgaaggcagataagtcaagccacaggtcagattccatgtcgatttttctagttttttatttctacccagctagagattcctaattcacagttacatgttatctagaactgacacaagtgtcttgtgactctctcaatgctcagaactgaacaggagggaattctagaaattcaaacacattctttgtgttactgcagggaataggttactaattaactctctgttggatgctgtcctggacactggaagtgttttgttcatgtatcaccacatacatggtgtgatgttttctcatgtacatgactaatttcctctttcaatgagtaaaataccagatactaccacagagttgaatttttatcagtgtgattattgaatttgttatatgggcttcttatacatctgaggaacatcttgattcttgggtcctgatgtgatcaagtttggggtatttatgatttcatatgtgttttggagtcactctgtacaacaaagtgatcagagatcagagaaactgtcttaactgtaattgccatgttggaaagaatgctttcccattctcccctctgttgggaaactcacagaagcatttcatagccatttttcagcaggagtcagtgtggtcctgttcctattgactatttctttcccaacacattaaaatgtgtagctggaggaaaaccaagtgctccaattgttctattttcttccacattggttcaagatcaagggataaattattgatcatagtctactatgagtttgaaaagccagctatgaattgagatttggtaacagcttctttttagaaggcttacccattcatgttggctactgaaactctccctatttttcagtctaaaaaccaatctaatatgtaactgttattattattctaataagattgaattttaataacagttgaatgtgcctgtctgtctgtagtacacacttgccaagtactgatttgagctttgcacttgagtggtatcattcatccccaaggcaaagtgattttttttcacacatacttatgatagtgtctctttccccatgctaaagaccatgtcattgctcaagttttcatttcaagaaaaagaaagtgcccatagcaatttgattgtgttcagtgttctttttgaacatcttttcacaagctttgctcttatctcctgattcctggcaatcacagagcttgccccactttcgcttatcgggggggaaaaaaaaaacaaaaaaaaaaccttaacgttgactgatggcttgttggctctggtctctgctttcagtgagggaactcattactttggtgaggaggaacgttcttacacagtcatttcaggatattttaattgtctttatgagttaggagactgttttagaagatgatgcaaaattctccagtagttttcttgccaatatctggcaaagcatagcagacaacattccagaaacaaatatctaacagatattgtcttgatagattcatgattttgctttctgctcacatgcttcattattagctgttgcagaatctccatttgtctcagaacatcactgcactgcaattcttgcccctttctactttgctattttgagttatatttatgtctattttcgtcactatttttgtgtatcaatgcaccatgttagagccagtagtccctttctgatgcatgtgatgtatccagatgaggatgagggaagagtataaattaaacaacctgaaccattgtgtgcttggagctggagagtagctcaacaatatcaaaaggggatggcttttgcagaggactgaagttgggttccaagtacctatgttgggtggcttataactgcctgaaactccagctcagggatccaatgtctcttggcctccatgctcacttagcctcacagcacatacgcatatgcagatgtacaaatacacaaagccaacaaacacaaataatactttaaacattaccttagtatggcagtggcatggggatatattaattaagatgccttggacctagtaatggaatgctaatcaagataatctgatttatacattacttttagtatttacatagagatatacaacttaagaatactatcaccattaaaaatacaattgattttgttaatactctttcttgacatttgaatataaaatagttgtcgatgtgatggctatttttgccatcttgactacatctggagctaactaaaacccaaggggctaggtaaaactgtgagggatttttcttaatttctcattgggggaggggaagacccaccctaaatccagatcttttgaggtgggaagatacaccttttatctgggccacaccttctgctggcagcctgtacaaaggacagggaagaaggaagcctttgctctttgcctgtttacccctgtttctgctggaaagttcattcattcacagacattaaatgttgcttcttcaggaccccgatgtatagtggactgaagaccagctgagatatccagcctcatctgctgaaccaactattggattcttggaatttcccttggtagatagccagtgttggactagtaggaccacagcctgtaagtcactctaatagattcatcacatcagttctgttcctttggtgaaccctgactaacacaattgactgaactcatttcatattttttcttagaacctcaaatgactaaggcacctgtgaacaacttgacaggtttccagggtcttctgggaacagcctgtagtcaagatctgatctgtcaggaaagagtgagcattgcattccattgttcagatccctccttcagaacagaagcttctacttcctcacatggtgtggtggcgaatagctgatagccctcaactgagctgctgtcagacagctatcctgaattaatgacaataccatgcccatggatgtgactcttctgataccaattctactcaatgactggaggacatttgagcacatatatatttaggattgttctcaatttggaaggcttgccttggctctgtacctccccaatggggtcagctggattctatgttccccttacactacagctaaccatcttctacctcaactctgacagccagtcactgcccctgagaatacatgccaccagtgtccggctcacagctcttctctgagaacagaatcttcttcaagaacagagggcattctctgagtgaatgggacccatggcacagagatgtcctgctcctctggaatcacttccagcaagccataagatgacattggaggatgctcagcctttcatttctcaattaacattagaatggagcaatgagcggatagtgtggctcacaaggagatccacatgatttggacttcaaaggaatccagtaaggagttacccattcctgatttcagttgtgctttcatggtcaattatctcaaatgggtcaatttatctcaaaatctcaatttatctcaaatctctcttgttcattcatttagtttttacttgataaatgcacgactagagaaagtgacttactaacactgaacacaagccgtagatagacttcctacttgcaagtagactttcatctcaggattcttgatactcctagaggagaagagggaacctgtgcttcatcagagagcaactcccaagagacctagaagaaaaagagcttgctcagacttccctctatctcctccaaacccggctgttcaggggcagagaggtatcagagtaaggattatgttcaatacccatggaagaaaatcccacccacatatccaccatcggtgctgtagagtttattgtagcaagcagcttggaaagttggtagaaagctatgcatggtatgtccacaatcccaagatggcagaggcaggaagatcttgagttcaaagccagtcttgtgcacaaaatgagaaacaacaaaactaaccagataaaaaacagacaaaataagctataaagcaaacaactattttaggttagctagagagaacttgattcgaaactatacagcatgctcctgtttcctcacaagagtttatgcacatgttcttttcactgtgtaccctcatgatacatgtgttacagtgctgtgccatagttaaccctgtaggctatgttcacttctatgttatacattctatgactctgaaaattgtaggaagataaatccatggttgtaagtgccagatggtttttggaccccgaatagtcccttctaccatttcccaaggcattatcattcacttccaagtaaatagtgtctggtttcaatcactgtcaattgacttcactgttttgaccagtaagtgaatgaaatgatttatgtaaggttacatatgtgtatacagttccctgtgactgactttgcccacctttcgactatgagaattatctgcactgacacacatatcagtagttcttctgtgtggtttatttaatgtctgcacaacaacccactggatatcatatcacaaattatcccttgtccttttgatggatacatggattgtttagttttttttgctttgttgaggttagtttttatgaatagtcttttgatggatgtatgcactcttttttatagtgatttaacagatgagatctattttgagctttgctaagtaggcaatggaaagattttcacaatgtggttaaaccagttccaattgacaacaaccatgttggagagtgttagctgcttcacaaactccccaatgatattttctgtcattttcagcttagcaattgtgatggtgaagactagtataatggtgatttttatttgcatttccccagtgaggactgattttaaacaaattttatatgattatttactgtttgtattattctgttttgctgaatgtctatccaaatattttcttattttaaaaaattgccttagatacaatttttataagtactccagagttcatcatgaattgtgagtatagtctcttaacacatgtatatatatatatatatatatatatatatatatatgcatgaatatctatatctatggctagcttgtgggtgtgtgtttgtatgtataaatgcagagtatgagaacatagatatgcatgaggatatgtactagaaagataatataaagtcaggtcatataagtgtttttatatgcatacatgagtataaaaaataaggataccttcatccacatacatgtttttcacccagtggcttgcttatttacattcttatttttaagacttatttttattactttctttaaaggtgtgtgtgtgtgtgtgtgtgtgtgtgtacatcagtgcaggtgtctactaatgccagcagaaggcatttcatatcctggaggtggagtttagctgagaaccgaacttgggtcctctacaagaacagtgcatgctcttaattactgagccatctctccagcccctttattttattattattcatcattttaagaatttattttacataccaatcacagtttcccctccctcctttcctccggttcccttctaaagccctcctctaaacccccattcactcctccatctccaatcagatgggaatcagcaaagcttggcatatcaagttgaagcaggaccaagctcttcccccctgcatctttattcttaaagatgttttcaatatacaaataaatatactttctttttaaaataccttctctctctattatttatgtgtagttctgttcatgtgtcaacatctgtgtgcatatagaggtcagaaggatgtgtggattcccttgaaggattacaggcatttgtggggcatgggtgtgagaatcttatttgttctgtattctttgaatttccatgtcagataaaaaatttatttatcaatgtttatgaaaaatcagtttcctatggagttaccaattctacagtgtatcaccactgatatttcctaatttcatttagccataatttttaaactttaatgtagaggtcataaacattattaggtttattatttgacaaattttgatgctattataaatactatagttttttacaaaactcaattttttcagtgttttctagcacatgaaggatatggaaattccagtgatttcagtatagtagcctgatgtccagcatccctgataaatcaggttatttgggtggagagatggctcagtggcaacagcacattgcattattttgagaatgaaatgagccagtgttgccatgtgcttagcatgtgctgtgaaaataaaagcacagtattcctttctaagtgcttgaagcttgactttactctatgaaggtatctatgaaggtatgctcagtttcctctgtggggctatattccagccacaatgacctgtcttttctcttcattcttgaatctgccacttccttctgcattatttcccagtgttctcttggatccttttgggatccccttcttggactgctggcgtcctgacccctaatggacaattcccttctgtagccttctattttcttctctcctcatttcagcctgcactgtgatgtagcccagcctcatctcccttctcttggaatgactgagaacacagcctggctgaccatgtctttgctttcatccattaggacttctcaccatcgtttctgtttgtttgtttcctctgtctagaagcaagacagcagaagagccaccgtttgtgtcccacagctctgcagacctgtggttccaatgctgtcttggctgctaagacaatggaggaggcagaggctcctcaagcttgctttgtttccaactcttgtgtagtatagttagccctgcctagtctccaggaggacattttccttcttgaggacagtatttgcaattgttttttgcccaaatgacaggctcgtatgaattaatatttgccacccagagggggcaaggctgccagggaaatgccccattttgtgaacaatggaggtttactatcccagtgtcacttccatttgtcttctctgggccaaaaagaaaggaaaaacaaagctaagggctaagcttctaggcatgaggattctggctttctgactttgaattccagctctgagtgaccttgagcaatttattatccttgtgagttccaacacttcacttgtaaaatagagccaaccccacccgctgcaaaggcttgtctgtatgctgacacagtgcccctagcatgtccagactgtgagaatgtccctattaatgttagtgattgccattatcactcaacgctttactgctattagcatcctttctcttgaatttcacagagagccattcatgtgattttattcccagcttctctccctgcctccttattcttctgttccttgcttatcttttgaaacagagttgtatgagagttcactgcttggatgtcacatggctatgatgttttaggattggggaagactgatgcgcctctgcgtaggcaggccaggtaggctttgagatggtgggaagcttccagatgatctgcgtcctctctccaatggagctgagtgatcgcctgaagagttcattggagcctggtgcgactcaggtttaatttgacaagtatttcaaattctggaattcaagtctccacagccgtaagttcccatctttgtagtcttcacagggttggaggaaagtttggtatcttgctctagtgtcactattaatataagaaatagatcatgtcaaacaagaattccaattatttttatgtagggagacactgttgcctcgcctcctagtagccaggacaggtgtgccggaacacgcccatgagggcatggtgaggggaagtctaaggtgacgtaggaaggcttcttaagggaccaggacatgtggaccttcccttcttcttgcccttctccctacttcctcctcattgctctggcctggctgccttgctgccctggcaagctttggcctgcgcttggctgtgtatctgaataaagaaaccttggccctattgactgctgattgatcactccacatttttatatcaaggttgacaaattgtatcaacttgccttcattagtcataagaaattggtgtcctgtgtcgaagaagaatttggggcatcgggtcctggtgggaaagagtatgtgtcctcttatcagtgtctatttcagaagtgagaatcaagtgggactagataatgggtgcttaccaacttcctcattttccaaatgcgtctcctttatcagagctctgcgggctgctcagccatcctaattgccttcactctgcctgagtgtggatgccagggtgatacacctgagaccacaagattactcagatagacgtgcatgaggagtctgcttcaggttgaggagggccgagacacagaagaaaccagaaccaataaaaccaggtgtaatgtgacaagacacctgcccccctcaaaggacaacttaaaacatttttatgacaccagatgatttttgtggcagatttttgtctcttccaacgtcattagtgtcatactgtcatgcattcatatctccttgtttcctctctttgaacaggagtggagaaactgaaacattagtgttgttaacatatcacaaggtgtgtagggacagagggaacagcccagtgtccctctttactccacctggctgctgacactgaatacaaagctgtcaaatccctttttacccacctacgaaacattttcctcactcatcaacttctcatacattgttatttatttatttatttatttatttatttatttatttgagacagtgtctcagtgggtatcatgctggcctcaaattgtctatgtgaccaagaatgattttgaactctgatcctcctccctctacctcctaagtgctgtgattacaggcttgcacaccagttttatgcagtgctgagaaatgaatccagggcattttgcatgctagtcaagcatcatgttcactgagatccacctagtttctactgtgtcaacttcattcctttcttccctctttctgtataaaactattagctatgtgaaaacgtatctattgcaatgagagccaaacatggttcttatttttttcttttcttttctgtagctctcatgttctttcaagtagaagacatactgttgttgcctcaggaaagaaagcatcaaatccagatctttcataggtcaccaagaagcaaggcagggaccagaactcagggttctgacctcagatctgaggctgtggagtatgggtccaaaacatagccggaagctgaacttccccaaaagcctccatctgaaatcgatgcgtaggagaatgttcattttggaattgtagttggaggaaatgattcatcgaattgtgtgaggaaactcaagagtatcaagcatttgttagctataaaccacagagatggtaaaaacagcagacctccagcgtggctgggctatttcacccaggctgctgtcagcagggtccatgcctcagcatctgtttcccaggaggctctagggatccctgtttatgaaagcttgtcctgatgttccttccaggcatctcatcaaccgaatcagaacgtctctctctttattaggtacataaatatttatgtcactaagtgtcagagcctcagggtccttgtcatttgttacccttgtgatgcctgtgctgcatttttgtttccgaggctacataaatgggtgaggcgttgggctggagatgtagagtaagggatggatggtctctgggcatttggaaaagatgctcaatgtgtgagcagtcaaagtgggaagaaaaggtgggaactaaaaggagggatttgtgcaaatgtcttctgtctgtcattcagcacctcccagtcaagtagcagctttagaaaaaatagtaataagtttgactgtctcaagactaaataatctctgtgtcttacttgcccagcagagccctaacactctgttttcatagttcttggatttctaaaggttggatgaatgtttggctcaattactccattttactctagcgaaatttctggtgagtgtctatgtttattattctatgaattaaacagctagggcacagcctacctgctcagaccgcctaacatgttttacagattataggactgaagacacagctctgtggcagggcacttgcctagtgtttgccaagcttccaccccagtataacaaaaagaaaacacaaaaaaaatgaaagaaaggaagagggggtggaggaagaggaggagaagaaagagaatatctgtaaagcttatttttgcaatgggcaactctcagtgggtggatgaataactgggcaaagtgctgagagtgagagcagtcagacctaaatagtatatctgtgttaagcccattactaccacatcacagatgacctttaccctaaccctaaccctaaccctaaccctaaccctaaccctaaccctaaccctaaccctaaccctaatcctaacccttaccctaaccctaaccctaaccctaaccctaaccctaaccctaaccctaaccctaaccctaaccctaaccctaaccctatggtgagctgtgaaatgctgtctttgggacatgatatagccattgcaattataaactcacaacagctgtggttgcctacacaggatcaggccagcaaagatgctggcatagatgatgtagatctccaggctctacccttaactaaggagctgcgggcagtggacagttactggggcggggtagggagtgtctttctgttttaggaatgttcctaaaacagaactggtaggtttcccatacttcccatgcacaacatgtgtggcagggatgggacttaatggattatttaaaaaatatgaagccaagaaggggaatgttgagggaaacaaggagaactagagagagaaaatgggtacacatgatataccattttacacgtgcatggaattctcaaaaaataaagaaaaattcaaaatacatcattattttggagaaattaccatttatttttcttttcttcccctgtccctgttaactaagactggcagagtatgtgttgtcatttgcctcctcaagagaagctaagtgctaccctctttaatttgtggattggcttcttcctcttcccttctcctccctatccctgtccctttccccttctcctcctcctccctgtctccttcttcaaagtttgtctaagtctgtatgataaagtcagatttttaaagattagaatctctcacaagatgtcagcttgggaccaaagagaaactattaagttaatcttggattatttttaaggcattcaggagactagggggaggcctgaccatagggcaagctgagtatgccttgtgtaatattccagtcctgaaacaaagggtgggactactgccttagctcattttctattgataataatatcacaggacccagtaggtaagaatcaggaaaaaacaaatattgttattcatggtttagtccaagaccaagggaccacatgtggttgtgactttccttctggtaaagtcctcagatggcacagtagatcacatggctagaaatagggatactggacggctcttgccaggctggtttcatgtcagacccactcttgaaatagcccgttcattacatgaaaggattagtttatgtctgaaggcagagccctagtcacctctttgaggctcatctgtccccacattcttaatttctcataatggaaactacactacaacatgattcacggctggagaaagcagccatggcagccacacagagaatgtttggacattgtcaggataggtagagaactaagaatgagacactgaatgagaagtgtggacccaaggaagaatattttctcaaggccttggttggcttgcaaactcttacagttcatattttggtattgacttaggaactctaagccaaacctccttaagcaaaatagagaacttactggttcttgtaacggaacagacatagattcagcaaagtctaatccttcactcagaaactctggacctgagcctctcttccctccttctttcctcagtgtctctcgttggtttgactctggtctcaacgaaggcttttttcctgatgtcactgtggtgtctttcaatagctttggaaacatttcctatcttaatgtcatccagtagtgtataagtatcctgtggttgaatctgaatgtttgtttgacctccactgagtcacatgccaagtcctgagccaatcacttttgttaaggaaatgggaccacacaggttgtcttaaatgaaccagagcctgggtgtaaatgtaggcactgagggatagccactcttaaactggatacattttatacttcatagtggcaaaatttccagtctttggagtaaaaatatcctgattctaagtccagctgcatcacttaacctctgataaccattaggaatcgcttgaatttcaggatctttggcttccttgttttgtttgtttgtttgtttgtttgtttgttttttaagcagggatgataataaccgttatagggtgactagtgtgagatttgcatcttggaaactgttgtaaagctctcagcagtgtttcacacactgtagatttcactggaagcctggtttccagtcccttcattgtccccatgggctgtgtaccatttgaaagacataaaagcatcttccagtttgaaagatggggaggtcatttggtttctgatagaaacctggaccttagcatgatttggttatgaacaaccttacaggggatcccctgtgatgtctgagattaataacttaatgtcttacccaccttctacattgaacatcacagacttctctgtgtaggcactccaatagcttgatcttcctggtctccacttttttttttaaaccaggtttctgttccatcaatagtcccctccatcactctggtcttactgttacacttgtgaatatgggaaacaattgacttagcaagtacacttgtgggtattttaaactcttaggctctgtaaatcctcatcttcactgagatgaaacctacctgaagactccctgaatactcccattgccccaaacatttccattgctgaaaatctgaaccgtatgatgatctaccaaatttccaccctatcttctcatcaagttgatactgatttcaattctatactgtttcatcttcctttcatcttccacatagtaaatgcccccccctttttttttgcatccagtggctaatccagccattttcttattcctttgatcactctcctgggcttgatccccaatcttgagaaagaggccacacggttgtcttctctgctcctacacccacattgctaagaatttccaagaaaaattcataccattctttaaatggatgccattatgatttcattatctctgatcacatgaactctcagtgatgccttccagcctacactattatttgtacaatctgttgaatatattcaccattctttacaaatctgttcttctattcattccatttgacttgcatcaggcatatatttcactgaataaaaaccaacacagcatacatttctgatcatctttaaagcaatgttcttgaatctacatccataatccattattctcttccctgagctaagacaagtttcacctgtatctttatcctctcacgtttggtgttggctcattttcctattttatttccatcagcagtatttgtaactttcttatctggccattgtctatttacagccacatttcccattttcatttagttttaggggttcacagttatttagttagagatatttcttaaaatatttatgtgtttatttatttttatatgtataaatattttgcttgcatgtatgtctgtgcacaaagtgagtgtacctgcaggggcctgaagagggtcttgaatcctctgtagctggagttcctggaggctgtcagatatacagtgtgggtgccaaactcaggtcctctgtaagaacagtatgtgctcttaaccgccaaaccatctctctatcccatccaccttgttcttgatacagaaatctcattggcacctggtatatactgatttaaggctgactggccatcaaattccaggtatggtcatgtttccacctccctggagcaagactgcaaatgcatgtcattgtaccttgtaacatgaagttttggcttggttaggtcctgctgcccttctctgccccaaagaagcacacagatgctatatagttataaaactgttggctgttggctatggtttcttattggctagctttgtcttaattataaatccatttctataaatctaagtctttccttgtggtcttatcttaccagagaaaggtccaaagacctcttactcctctggcatcctacatctctactgtttagcatcttggcagtgaagggagaagagagccatttcttgtttgtcccttcttatgttctgattctgcccagctacttcacttcctgcctggtcaatcagccaatcagtgttttattcattaaccaataagaggaaacacacacagaagaatattccccatcagtacctggcttttcctgtggctcttagagctctaactcaggtcctcatgcttgtgccacaagcactttgtaggataagccatcttcgtaggtactttatccccattttaaactctttgtgacatttagaaatgctacttatttcttattttgatatggtcctccagctccaacatatcattttctcttttccccaagtgtggatttttattagttccaattagtacatgattaaaagtttattaaatcagaatacttaaaataaaactagtcttttatattagtataaataaagataaatgtatacagtagtttataaactcttataaaaagtgtttgaatttttcaggtgaaaattcatatagaagacaatactcattcattaattcgcttatatgtcaattcatttattaagtgcttagtcaatacatattcaatgtcttgagcaataatagcacaattattaaaagatagttacatattatcctttttttgagacatattgactagtttattatatgggcctggcagagtagggagactaagagagaggaggaacaggggtaatggctgaccgccatggctggtcgccatagacagccaagaagaaacagagaaagtagagagagtagaaagagaagttggagctttttagggaagattgcgcatgtgcactgaggttctatgcatgtccagagtcatcatgggtgacgggtgacatggtgatgacgtagcacgttttcttgcacatgccctgagtattgtcagggggcagggcctgaacctttcattcccacctctacttattattaaaaaaaggtggggtgttagacatggcagggtaaggaataagggcattgaattcttaagactgcttcctgctgatgtagggggcattgaccatctttgggggacccaagaaggttggggtgctgccacgtcctggggtagctggctgtttcatttcagttcaggctgtatggaactccctgatgcctcttagacctgtttgtttggatccaatccagctctctggaacttacaataatccttagagtctgtggaaacataagtattagacacattagcagcatattcatattagaagcaacttggctgaaagcattaatattttaagattgacagatatttttgaggacaatgaaaagcatcttaatcttgaccttgtagttatgatcatatagtggtattgttgaactttactatgaacagtagcatgagaaacagagaaatcaggaacatatttcattctttttaatgtctcaactcactttatcatcacttaagccttttttatcctcagacctttataactttaattcatatactttacattaccatcttagatcttccattctcagaccttcataacttgtatttatccaccgtgttagacctttccatcctcagacctttgtaactacattctcagaccttcatacatcttacactttcctatcttcacatagataaaccctaaaattcctgttcctggaatctgttttgctttaagctggcaagactactagtcgtcaaacgaatcagagttcttgagaaggataagattttacctgaatcaatgattaaagaataacagagacttaccagcaggctgcatggacagccatccccaaggtcctctatccatagtagcgggctgcagaacacctgccttcttgctcataacatgtgacctgtggattatagactataggaagactcacctaccattggcctaagcaacgtggggaaagtcgattccactgtcctcttgtccacagtctggagtaccttgtagcagttgaggtgaagggcagggttgctcagtgaccagcgttgtcactgactcgagatgaaatttcttcagtgcccatcagtcttcttggaggaaatggggtggagccagcagctggcctatctctctgttataaaaacctttttaacaaaacattttaaatgccatattctctagatctctgagcatttgagggctgtctgtttagtatctcagcagttaagtttgcctttagtagagaaaaatccctttttgtaataaaagctgtacctttgtaaacagcttacaggatggactgagtggtataactattttgttagcttgaaatagacccttatgattttgaactttcatcatttaaaaacacatgagttaaatttatgttgtatagacttagcttatatttcaagtatagttaaattagacctttatgactttgaatgtttaccatcatttcaagatacatagcaatttagaaatgagtcttagcacagtttaatttaagttgcatatagagctagataagtataaagttaaattacaggaacagagacaagcaggactatatatatatgtgtagtatgtgtcaaatacatacgcatgtctgtttcacatgtatctgttccaaaggctcaggttaggctttctatccctttttcttttttatctcaactaattatctggatgacctcatgcagcctcatgactttaaatgacacctacatgtaacgataactctttctgccagctgcccaagttctgcctccactttagggcctccaaataacacacagagattaatattagttacaatactggtggccaatgactaggatttctagtcattgtatttgctagtatttgctagctctgtcttaagtatcaaccataactactaatctatatattttataaagacttgttgaggaagccagcagcatgcatcctctcatccagggatcacatggcgactccccttactacatttcccagaatcctcctccactcctagtcccacctatcttgcttccctattggccaacagtgctttattcatcaaccaataagacaaacacatacccagaaggacctcccccatcacctacataatgaggacacctcagtttccatctgtaatccagacctccccttgaactccagaatcatatatcatttgtatattagacacatctcctttaatgcataagaacatctcagatttaacaagttcaaagccaaggttccacgtgtgtcccatgcgtctgtgtttcctgtggtcagtgtcaccgtagtcaatagtaactctggacttgtgctcatcacaccaacctccttctcagttctctctcccaatctgccaccccgtttaaccagtgaatcttgtggtccttcttcaaaatatagacagaatccaccctcttatcactgtttttgttatcaggcttctacaaaggcaatccttttttgcttaagcaattataaaaggtcctatatactacttttggtttccctactgcctcttatgctgtattcacagcccagcagctcaaatgacctgttcaatcctagttggggcatgccactcatatgcccacaattcctccagtgcgtcttgcctccctcagggcaagaggtcaaacccttccattcccagattcttatcttcatccctcacttactctatgcaggccactccaacctcctcactgatcctcatacacacagtaggctccttctctgggacctttgcatcggatgataattctagattcaactctttaggaaaaaggttctggagtgtttacatagaggatttcaatgagcagtgccctttgaaacatcatctgaatagagaaattcacctgtgatgccattgcaaagaaacttctgctccagcactcagagggcccttaaagtacacacacacacacacacacacacacacacacacacacacacacacacacacacactgttggatattgattgactctaggacatatttatttatggaatggcagttcttttcagaaacagcagtgcttgggttgtgaagggaagattctgagtgttgatttcagaaccaatagtcaaaatcaagaggaaaatgctggcactatttgtaatagccagaaagtggaagcagcctagatgcccctcaaccaaagaatggatggaggaaatgtggtacatttacacaatggagtactactcagcagaaaaaaagcaatggaatcttgaaatttgcagggaaatggatggaactcaaagaaaccatcctgagctaggtaaaccaatcacaaaaagacaaacatggtatgtactcactcatgtggattttagatatagagtaagggattaccatcctacaatccacactgccagagaaactagtaagcaaggaagatcctaaaagagacaaactttgtctcctggagaaggggaaagggtcaccatcccctgagcaaattgagaacatgggaagagggggaggaagctacgagagtaagaagggaagaaaaggaaggatgcagaggtcatgaggaagcagaaattttgagtcaggtgtagattagaagaaaggacatatgataggtaggattttagttggggggtggtaggagaggaagggagggagaagggaactgggattgtcatgtaattcaatcttgtttctaattcaaatatatatatatataaaagaggaaaatgctggacagttgagcgtgcacatctcaactttaggagattttgtcaaattattttttaaattggtcattttttaaaaatgagacatgagtggttttgatatgtgcaaatcagaaaattccacccaatttttacaaatcaggaggaaacttagtttgggactacgtttatgtgcttacaatgttgttgtatctaaaactgaagcttagcatcctgacctgtgatagctgtacacacagagacagacactaaattgctataggtcaaacattccatctcagaaatgagagagactagccaataggggtacattatcccccgcccccagggctgcattgaaaagcacataacaccacctgagtgttctttacactttagctatttataccttgcctttgcttctagttcatagctcatattctgtttgttatagatcattcacactcagttaatctgccaccagttttgatggatcgggcaaagtgttctagagaaaagaacatgaacacctataaatctaaaaccttgaggtattgagatgtcagacaccgaacatacttgtccttatcagggttgggacagagtttgttctatttttgcatcactcaccttacccttctcttcttaatactgaatgaactccactgaaaggaaaaaaaagacagtaccccgaagagtagctttgagttgctgaggatttacagagtttcaggcactatacttagtatttcctgcatcatctttcatttgtgttcattttggtaaggacatgagtgggtttgatagagatgtctaggccttctgaagtatcaagggggaaaggggcatggttaagaggggttctggatttggctcttctggatttcaacccttgcttgcacatttggtgtctgattatgggcaggaattggaatctgtctcagttctgctctcatatttattgtagggacttaataagtctggacacattgctgactagtgccctcatgctggaagcgctcagtaaaagcacagaaactccagtgcagggaaagggcttcaaatccaaattaatctggattaatctctcatattcttcagcattctgtttgtctcaacttaaattttgtgtgtatgtgcatgtgcacatgtgtgtgcgtgtctctgtgtgtgtagctatgtgtgaacatgtgtttgtgttctcactgagatcagagatcaccatcagacgtctttctcacttgatctctgcattttttctgaggagacatttctcactgaactcatcatttgtggcagactggcagggaccttcatatgagtaccaggatttcagaacatacctccacacttggctttttgcatgtaagtttggaatctaaaagtactcattcttgaatgcaagcattttagcagctgacccaacctctttgcccttgggtctaataatttttgtaatgtaacaatagaaactcagtgtcatctcttgtttcattttttgttcaattatcccagagatgtaaaaattatgttcacacaaaaacctgcccacatatggtgaaattagctttatcaaatatatgaattagctccttcaagcaggagattggctaaccaaacgcctggaaaactcagcaacaaaatccatcagtaagaaagagcaataatttgatggctgcagattttatgaatgtccagaaaattataatgaatgggaaaaataacaggctttagaagttagatactatatgactccatttgtggcacattcttgaaatgactgaacattcttctccattctttacaaatggtgaagagattggctgttgcaagggattaggtatggggaacatggatcaatggacatgagttcagttgtaaaagaacatcatgggggaatctgagaaatgctatggtggacttcacatgcaggaagaggatagtacctaattctctctcttgtctctgtctctatgcctctgtttctctctcacacagtcacctcacgaatataaggaaaactataaattttaataagatcagcaagtcatctcaatgtaatatatatatatatatatatatatatatatatatatatatacaaaattttctatataactacaaaattttctattaaaggtgtggtggtttgaatgagaatgacccctatagactcatatattagaatgcttgctccccagttcgtggaactgtttgggaaggattaaaaagtgtagcctcattggagtaagtgtcaccttgttggggatatatatcattgtgagtgggctttgaggtttccaaagcccacgctagtctcagtctgtctctgtgtctgctgtctatggatcaggaagcaaagctcccagctactgctccagctctatgtctgtcttcatcctaccatgatgttcatggactaaccctctaaaactagaggcaagtccccaattaaatgcttacacacacacacacgcacgcacgcacgcacgcacgcacgcacacacgcacgcacgcacaatatgtagtcattttgtcctatccagagcagaggggctaatcataactcagactttccattctttgaggagaactcagtgagaatcttggtttgtcaaattctcttatgaggcaagtaagtaaattatgggctggtctagtggtcattatcttttcatataaatgatcttgcaatgaatattcattcccaagtcttccccagttggaggatcagagagaggagagtgttgtcctttccagaaactgcacatgcccttctccatttacagctgccccattagtggagttgttcttgtcagaactgtgtgaggcatatggttttgttagtctaagggacatgaaacagtagcttcacattttaactcagatttcccagttcctgtttgattcccttagttatttctcagagctgtggtttagatgcttctctggcaaggtccacatataatggcttagtccctaggggccagtgctggcagacaggtgctgtggacctcacagaggtgtgacctgagggaaagcccagggataccgaaaacatgctcttataggagttgtgtgaccctggtctctctctccctgttgctgttattctcgctcttgatctaagtgtctccctccttgcttgaaaggcgagcacttgctatgacttgaactctcaccacaatgtgttaactatactcaaaactcagggcaatagagtctccagatctccaacttgcatttccagaactcatgagctgagttaaactgcactttcttttacaagtagcttatgcagggtatttgattagagtgacagaaaattggctgatacaataattaatccagtgctttcccatgtgagttacctgttcttcaactagctttctaggtaatcttctaatgagttctttataaattctgtttattcatgttttgctataagatatctacagcagttattgcctcttgtcacctttgttattcttacaatcttagttggaagccagatttggtggctcatgtctatgataccaataattgaaaggttcaggtaagaggatcagaagttcaaggccggctttggctatctagtgtgttagagaccaccatggatctcttacctgggggtatatatgtgaaaggctttagtacccagaaatttccaattctttagcatgcttcctgatccagtctttattaggtgtatatcattgataaaatagttttagaatcagtcataaacctatgaattttcaatctctctacagttctaatgatttacctcttaagaaagggggacattttcgctgttattctttcaggtaggtgcaattttgattgacaaaggctttgatgttgaactaaacagaaaaaaaaaaaagagaaaagctactggtgtccttttgtttaggcttcattatactttgcatctgtcctgacttgtattctctgtattctgatgtattgctcactgtgttagcaaatcagtacttaattgaacctggacagccccttattactaattattttttgcctaagggagtgacccattattttcttactattcctatggctgctgtcagagaacatcctatttaaccagtttttagccattagccagaacctacttgctaaaaccgatgaaactaatgactgttgggttgatgacttactgcccataggaggccagcactcgctggataattagcagatggcaacccactccttgggtgatctcgatccctaattaacatctcatcatttactgagttgtacctcaaaaaagtgatgcttaatgaaaacttataatgcaaggcaaaacccaacactaggtaatcgaaaaaccatgttattcttatttgtccttttatattgactaaccaactccaaattgtgctgtttttccttccaaggaaagtgggaaccatgtgaggatctgggagggtttgtcaggactcagctgatgggatggtcaaggcaggttattcgtggccccattatctacactggagagtaggactaggaagcagcagtcattattacaagggacaaagtgtgttgaccttatccccaaatgtttcaaaaacatagaattgaagaattgacatttggattgctattaaaggatgagtagagatttcccaataattaaagccatttattgccaggtggataagcaatgtcagtaactttggagaaaagtgacctgaatcatttcctgggactaactcagaattctcaaagcggatacagtgatggtggaggggctgaggggagagactgggaccagacaattgtgaggaactttatacatgacgatgaagagctaagacttggtgtcggtaacaggagaccacatgaagttctgaaccaggacaaggggtgatgtgatgtgttatttagatggtatcaacttctggcctccacacacaggcacacacatatccatgtttacacatacataagtgcacacacatccatactaataatgaagtagttaacattaaaattcaaagattttttcccactaaaagattcaggcattctaagattctccccccagctaggtttttagtattcctgaactcagtgatatgtgaaaacttcaggattttttctttaaagcacgtgtgacacacacacacacacacacacacacacacacacacacacacaccacatcacattgcttttaagatcctaacagttattggaaatgctgaagacacctcacttatggcatttgacttgataaaacagagcaccataaacagattcaaggggagtctatgattggaactcaaagagaagtcaggaaatatgcacagggaagatgattaaaagctgaaaacttttcctctcacctgatgcatttgttaaaagctcatgacctataaaaacattgaaacttcagtgtttgaacaaagtacttaatgaaaccaattgatttaaaaaaaatttttagctacttggtcattcacatttccccaatcattacgagcttctggaaacttctgttcttttgagcggatagtttatgaaatctttaaactgtggcaaagtttccaagcctgatatagtaaaaatgaccataaaccacaggtttaatgggaattatcagcaataagagtcacagcccttccctcccccaccttgctgccagggctcatgctaaacactttatgtcattgtgtaaatactacttttggtccccttcattttagtgaagcagcctatcatattgcaaacgtccccccccccccccgccgtggatactgaataacaaatctgtgtctctgattcctggaaagcatacccatttactgataaagcaattagttttgtaagtttcataccatttaagcttttctcacgtaaggggagagatttcccaacaagagtaagaatgcagagtgaatagaatctggtcttttgtcttttaactttttttctaagtggaatattaatgatatatgtcacttaaactcttaaagacaaaatacaatggaaaaatagagttttaatccatgaacattacttagctcttagcttttaatatcctcataactggcaatgggcttatgccggggatgggagagaaacaggaaatgaattcagagactgcattttactttcaagtttcaaaaacatactttccagtttctggggcaaccacacagcccccgggaggggaagacacttgcagcatgtttctttcacaaggaatcggctagaaatcaccagggctgtgtgatagctgtcaatttcatttggtctagaatttggttagcgagaggtcaaatactgtgggatatacacttggagatgagatatcagtaaatgctaaaatgttccccaggctagactcaagctcaagggcctggactttcaagtagctgggactttataatcgtgctcatgtaccatcatgcctactaggctagaaaaactttaaattcattcattcatgtacttattcattcaataatgtttgccgaacctagtattttataggtgtttctggaactagaatgatgaataatacacattccagagtagcaagacaagaagatagagtatatcagaatgggatgaggagtgtgaagaaaaatgaatcaggaaaaaggaactgaagtgtgcctcgggggctaagaaggctttgtttattgtatccctagcaagtgttctgctactgaactatactatgcagcccaagacgctgtttttaattttacatgcatatgtgtgtgtgtgtgtgtgtgtgtgtgtgtgtgtgtgtgtgtgtgtgcctgggtgtacatgtgtgtgcaaatgtctggggaggacagaagatggcatcagatcccctgggactgtgagcttacaagtgtttttgagcttcctgctgtgattccggaaactaaatcccattcctctacaagagcaggaagtgctcctaactactgagccatctgtcctgcccctcattggtttgaagtgttgaaaatacttctctcagtttctcaactctcttggagaattaacttattagaaatccttattgtgttgtcatctagttaattaaaatttctttgtggcacttaactctatttaaagaagtatttccctgcacccaagaaaaatcttggcttttattctttcaagcttcatggctttacccttgaatgttacgacttaagttctcaaattagtaaattaattccttccttagtttgtagcattaagcattgatccagacttagttcctgtttgtttgtttttcaagacagagtttctctgtgtagctttggaacctgttctggagctcattctatagaccaggctggcctcgaactcacagagatccacctacttctgcctcctgggtgctgaaattaaaggcatgtgccatcaccacctggctccaaactcaattcttaaaatatgatacaggttttccaatggaatcttcccaggctaccttttctccattggttttggtgataaagaattgttcacaatcttggcaatacacttactcccccagctttcctttttctctttgtgtgtgtactggttaatttttaatatcaacctaatacaaattacagaataggaaattttcttttaccagatacacatctgatataggactaatataaaaaatagataaagaactaaaattacgaggtatcaagaaaacaaatagcccgattaaaaatggggtacaaatctaaatagaattctcaaaagagaaaactcaaatgtctgagaaacgctaaagaaatggtcaacatccttagccatcagggaaatgcaaatcaaagctgttatgagatttcatcttatatacccctccacatcagaatggtcaagatcaaaaacaccaatgacagctcctgctggcaaggatgtggagtaagcagaacattctgccattgctggtgggagcgcaagcctgcataaccccaatgggttatcttatttttttaattctttaattactactcatatttacatatccatccccccattcccttgccctctcatcctcccaagttccccaccaacccccaacgcactccccaactcctcctcagggatagtgaggccctccacgagggaccttcaaagtcagtcacatcatttgggggagggcccaggccctccttgctgtatctgggctgcaatagtatccctccatagggaatgggctcccaaagtccatttgtgctctagggataaagattggctccactattagaggttccataggctgccctggcctcctagctggcatccacattcagagggcttggtttggtccaatgctgtttccgcagctttaagactaagttctccatgctatcagtacgtcaggtctactgtgtctttgggtttctccagtcccatcttggctcctttgctcattccttctccctctccacaactggattccagtagtatggttcagtgcttagctgtgggtgcctgtttctgctttgaacagctactggatgaaggctctaggaatggtaaccaaggtagacaccaatctcattatgggggaagggcatcaatggcatcctctccaccactgcctggcttcttagttggggtcatctctaacattttccctgtaccagatctctctccaaacctgtctatcaaggcatctcctcctctattcctcccctgtctcagtcctcttgttctcctctcccctccccttcttgccttcccacctccttcctctgccccctaatcccactttggtcaggggttcttgtccccatccccttctttgagggacaatgcaatcttctcttggggtcctccttgattcccaacttctctggcagtgtggattgtagactggtaatcctttgctttatgtctaaaaataaaaaaacgagtgagtacataccatgtttattttcgtgattgggttacctcactcaggatggtttcttctagttctatttgcctttgaatttaaagattccattgtttttttccactgagtagtactccattgtgtaaatggaccacattttctctatccattcttcggttgagggacatctaggttgcttccaggttctggctattacagataatgctgctgtgaacatggttgaacatatgtccttattgtatgagtgtgcattctttgggtatatgcccaagagaggaattgttggatcttgaggtagactgctttccattttcctgagaaaccgccatactgatttccaaagtagctgtacaagttggcactcccaccagcaatggaggagtgttcctctttctccacatcctctccagcatagattgtcattgatgttattgattttagccattctgacaggagtaagatggtatctcagagtggttttgagttgcattttcctgatggctatggatattgagcactttcttaagtgtctttcagccatttgaattcctctgttgagaattgtctatttagttctgcactccaacttttaattgtattgtttgatgttttgctggctagcttcttaaattcattgtatattttggtgatcagccctctgttagatgtggggttggtgaatatcttttcccattctatggggtggcgttttgtcttgctgactgcctcctttgccttatagacgcttctcggtttcaggaggtcccatttattaattgtcgatctcaatgtttgtgctactggtgctatgttcagaaagcagtctcctgcaccaatttgttcaaaggtaccacctaccttctcttctaggaggtgcagtgtggctgaatttatgttgaggtctttgatccatttggacttaagttttgtgcatagtgatagatatggatctaactgcaatcttctacatgtccgaatctagttatgccaacaccatttgttgaagatgctttcttttttccattgtataactttagcttctttgtcaataatcaggtgttcatatgtgtgtggattaatatcaaggttttcaactctattccattggctctatttttgtgccaataccaagctgttttcaggactatagctctgtaatagagcttgaagtcagggatggtgatgcctctggaagttcctttattgtacagggttgttttggctatcctggggtttttatttttccatatgaagttttgtattgttctttcaaggtctgtgaagaattgtgttgggattttgatgggaattgcattgaatctgtagattgcttttggtaagattgcaatgtttactaagttgatcctacctattcacgagcatgggagatctttccattttctggtatcttctttaatttctttctttaaagactcaaagttcttactatacaggtctttcacatttttggttatcgttaccccaagatattttacgttgttagttggtattgtaaagggtgatgtttctctgacttctttctcagcgcatttatcatctgtatatagtagggctactgattttttttttttttttgagttaatcttgtatcctgccactttgctgaaggtgtttatcagctgtaggagttccgtggtagagtttctcgggtcacttatgtaaactatcatatcatctgcaaacagtgaaagcttgacttcttccttttcaatttgtatccccttgatgtccttttgttgtcctattgctttagctaaaacttcaagtacaatattgaagagatatggagagagtgggcagccttgtcttgtccctgagtttagaagaatcacataagtttctctccatttagtttgattttggctgtttgtttggtgtatattgcttttttcatgtttagatatgttcctgttatttctgatatctccaagacctttatcatgaagggatgttggattttgtcaaaggctttttcagcatctagtaaaaggatcacgtagtttttctttttcagtttgtttatatggtagattacattgatggattttcatattttgaatcatccctgcattcctgggatgaagcaacttaatcatggtgaatgatttctctgatgtgcttttggattcgatttgccagtatttggtggaatatttttgcatcgatgttcatgagggatattggtctgtaattctcttttttagttgtgtctttgtgtggcttgggtaccaaggtaattgtagcctcgtaaaaagagcttagcaatgtcccttctgctgctattgtgtagaacatttgaggagtactgatattagctctttgaatttctggtagaattctgcactgaaaccatctggccctgggccttttttcgttggtatacttttgatgactgcttctacttcattaggggttataggtctgtttaaattgattatctgttcttaatttaattttggtaaatgatatctatttggaaaatttctttagattttcaaattttctggagtacaggttttcaaagtatgaccttatgattctctggatttcctcagtgtctgttattatatcccccttttcatttctgattttgttaattaggatggtctttctctgacttttggctagtttggataaaggtttttctgtcttgttgactttctcaaagaactgactctttgtttcattgagtctttgtaatgttttcctagtttctactttattgatttcagccctcagtttgattatttcctggcgtctacttctccagggtgagtttgcttccatttgttctagagctgttaattctctagtgttactattctccagtttcttcctgtggacacttagtgctatgaactttcattttagcactgttttcaaagtgtcccataggtttgagtatgttgtgtcttcattctcattaaattctaggaagcctttaatttctttttttatttcttcctttgtgcaactgggcattcttcaatttccatgagtttgtaggggttctgcaatttgtgttgttgttgaattctaactttaaagcatagtggtctgataagatactgggggttattcttttgtatctgtgtaggtttgctacattgccgagtatgtggtcaattttagagaaggttccatgtggtgctgagaagaaagtatattcttttgtgtttggatgtaacattctatagatgtctgttaatcccaattgggtcataacttctgttagatcatttgtttctttgttaagtttctgtctggtggtcctatcttgtggtgagagtggggtattgaattctcctactattagtgtgtgaggtttaagtgtgatttgagctttagtaatgtttcttttacgaattgggtgactttgtattaggggcatagatgttcaggattgagacttcatcttgatggacttttcctgtgatgagtatgaagtgcccttcttcatttccttggattgattttaatttgaagtctaatttactagatactaggattgctacaccagcttgtttcttgggtccattttattggaaaatcttttcccaaccctttactctgagttaccgtctgtctttgaagttgtgtttcttgtatgcagcagttggatgaattctgtctttgtatccattctgttagcctgtatctttttatacgccagttaagaccgttgatactgagtgatattaatgaccattgattgttgactcttgtttgttttggatttgttgttggtggtgttattatgtgtggatttcttcccttttttcttttggtgtttggtaaagtggaattatctattgcctatggttttatgagtgtagttatctttgttgggttggagttttccttctagtaatttttgtagggctagatttttggaaatatattgcttaaatttggttttgtcacggaatatcttgttttttccatctatagtgattgaaaactttgctgaatacagtagtctgggctggcatccatgttcccttagcgtttgtagaacttctatccaggatcttctgactttcaaagtttctattgagaagtcgggtgtaatttggataggtctgcctttatatgttacttggcctttttcttttgctgctcttaatatttttctttattctgtaagtttggtgttttgattagtatgtggtgaggggacttctttttgtggtccaatctatttggtgttctgtaagcttcttgtactttcataagtataaccttctttaggttggggaagttttcttttatgattttgttgaatatgttttctgtacttttgagctgaattttttcaccttcttctatacctattattcttatgtttggtcttttcatggtgtcccatgtttcctggatattttgtgttagggacttgttgacttgagattttctttggtcaatgactgtatttcctctagtgagtcttcaacacctgagattctctcttccatctcttggattctattggttatacttacatcagtggttcctgatcatttactcagcttttctatttccagcatcccctcattgtgtgttttctttattgtttctgtttctgctttcaaaccatggactgtttgaattgtttccttcacttgtctggttatttttcttggctttctttagattctttaagagatttgtatatttattcaattttttagtttgtcttttcttccatttcatgtaattttttgcttgtttttttcttctatttctttaagggattttcttgtttcctctttaatggctctatcatcttcctaagataatttttaaggtccatctcttcttcatcctctgcattgggcttctcagttcttgctggtgtggagtcctcagattctggtggtgtcatattggtctttctgttgttgagtgtgttcttattctgtcatcttcccatcccttcttccagtgggtgcaggtggtttctctccctctcttttagtctcctcaagcaaagggtggagggcagatgggggaccaagagtgatgtgtgtccagactcagggtggaccttcctgtctggacagatacacttttgtcagaaaggcaggcccaggaagaaggagagggtggtaactgggaaagttggggccagagcagagcccagactcacctccagcagcaggcagagggccggttatcttattttttgtttttattttctatatgccctatagatcatttgggtatatattatggcttctagtttagtgtttttatgtgattcccaagtgtgagaaaaagtggatttctatatctgtttcttgtgtcttttcttgggctctttctgtttgttttgtcctattcctatgtgttagttttttgtcttatattatattatattatattataattatccctcagaagcttctttgttttctaatgagagatgatgagggtagatctggatgagaaggaggtgggggaggaactgggagaagtagaggcagggcaaacaataacaggatatattttgtgagaagaaatctactttttaataaaataaaaacaagcatcaaagtatatactaaatccccattcacagcctagtttgtgaatatggagccaggcagacagagatctttggcaacaaacccatctccatctctcagttcagaccctggtcctggagtggcattcgggtcacctttttccttgttgaattttcgagagattagttctagtgagttaatgaataatattaaaatgttctcttgcttagaattctcagtgtttgtttattaagctgtgtgtcttgagataacaatggattggggtggatttctttttttattagttctttgagggttttctacaatgtgttttgatcctattcaccacctgcttcttcccagttctgcctccctcttccctatacaagcaactttgtgttgtttttaaattctcttaggtggatgtttctaagtcattaaaagcatgaaagagttaagacaacattgatgaatgaatgaggaggtggctctgtgggtaaagcaattgctgaagacttgagtgtggaccccaggactcacattaaaagctggttgcagtaacacgcatatgtaatccaaggatgtctcccctagaggaactgggacacagaggcaggagagccacaaggaactctaggaccatcttgcttgttgtatgcaggagctgtgagcaagacagatcctgactcaaacaagatggagggtgaggactaacactccagtgtctcctctctggtccccatatgtgcatggtggcacattcttacctccattcacacatgtgcacacacatgtgcacacacatgcatgtacaagcacatgcacaaacatacacatgcacccacatgcatactcacatatgcccacatgtccgtccatgcacccgaagtcactgagtattttgctgacaacactaatcctgaataagcttaaaaattagcatctgtccccaaggggacttggatgaagacttagtagtgatactagtttccttggatggaaatttcatccattgtgcatgtgcagagaaggtgagcaggggaattaattctgtatctacattctcacttagaattctaggtagcaaatttcttttcgatgatccaaagtaaacaaacacttcaacactttatcaaagatgtcttatgaatgtgacagatgtggggaggtcattggaaactgccatgttggtgtcatatttcacaggatgagaaacacatgaccagaatgctcgcagctggcatagctagcgcctaaggagaccctccagtaatggcactaggtttaatcacttgcttctttctcagttcattacgattctcaatctagtgtattccttagtttagttaatgctggatgaaagtaggggtggatagaattgaaaacacattgtagaaggatccgtgagtcccaatgctcctgccccaacagtctggttgtacattcccagccttggccttgtgggaataaccacacaatttacttttaccaaagggagatatggatttgcacttttgcttttctaccaccatggtggggagtacacatcacagatggcacagaggatgcaggtggacacagaagcctgaaaaaccagaggatcaaatctgcccaagtccatctatgaccaccaaaggatatatacttgttttcatgtgatgctgaatttgctgaagctagcgttagggctggggaaatggctcagtcagtaagtgcttgcttccttacaagtgtgaggacttgagtttagatccccataaaaaacattctgagagcagtggcacaggcttgtactcatagtactagggaggcagagacatgtagattcctgaaatttgctggccagctggccttgcctatttggtgaacttccaggccggtgagagatgctgtctcaagtaaaaggtggagtccacttaaggaatgcaaaaatgagatttctctctgaccttcacatgcctgtagatacatgtgcatgaacatacacacacacatacacacaacacacatacacagagcaaagtacaaaaacccttttattataatcattcaataataaaaatggtgtcttatttcaccccccaatatccgatttataataaagggtattcatttaaattaaaatatctgactataaaaatcagaattctatttttcttgcttttcttgatatactagaaattttattactggctcacagccatctggggttgtgtgctctaccatgggccgtgccagggtgcaggttgtgcatgtgaatcaaagttcttttatatgtcttctcttgtgcgtcacaatgccatttgggcagacctcatgcttcatgacattctctttttaaatcaggagcaagtatcatcacttgtatttaaacattatttctgggagccgaggtgggttgtcatgtccaggaggaccatgcaaggggatgggtcacctctaaaaggagtgagtagttccctttcctcatggagggcctgcctgctgccacccgagtgtctctgcccagtggtcttcattgaaagctgctgtatcagcctggatcaaacaggtgaagcgggatttgtttcctgcacattgctttctttccttatttttagcaacattcttcacaaagataatcatccaagagattgaatatcaaattgagaattagaggctgcagaatataaattacagacccagagagagaattcaacttttcctcttgtaataaagcatgaaggtggctattgacacaggaaatcacagcctggggacaagaaaaatacaaataattcaagcaaaagaccttcttcaccagtgaggcagagggctgagttctctaggtgagccaagctccatacatgttggtttccaccagtgtgatacctcacagtgtttatttggcctggcacatggcatgagaccaccccttgctggacaaaccaggctgctattaggtacaagtagactttgaaagtcctcagataattttgcatctatctatctatctatctatctatctatctatctatctatctatctatctatctatctatcttatagatagtgtttgtgtgtccatgtgtgcacactcatgcatgtgttcatgtaggtttatgtgtatgtatatgcatgcatgtacatcagagtttagagaccatagatcaattttgggtgccattctccagaagctgtctaccttctttagggggaacaaggtctcttgcttggtccagaacttgctgattagcccaggctggccagaaccctggggatcattccatttccacttccacagcaccacaatttcaagtacaggccactgtgtttggcttttttcttaatgtgggttctgagaactgaactaaggttcatctggcttgtgggatagacgcttaactgactatactatctccctagccctacttttgtttttattcttgaaattaaaaaaaatctgtgtatacatatattaacgaatgcatgcatgatgatgggaaatgaagaatgggctgtagttttattgtccctttcttatctgttaccaatacaaaagcttcctggttttgacatgataattacgcttgacaaatttagcaaataaaaatacaaagtatcttgtcacttaaatttcagagaagcagcaaggaattttaagacatatttatactcgaattttctgtggagtgaaattgaaatttaactgaatatcttatattttatctggcaattctaattaggctatagctttttaccatgtagcaattagcagaagttggctgaagaatacatgggattctgtgtactagttttgcaattttcctacagcaatgcaattgttttaaaacatatagttcttggaaatcacactctctttcttttacagcgtacctgagttaacttagctaacttagctaatgagcattcttagctaacctggaagggagacaggactgctgtcttggcgatttgtgtgtcatttatttggctacagtggtttggaggaggctaggttcttttctttgtgctgtggaaaataaccagatcagacaactgtccaagacaaattttatgtggcaagcttgccctcccattcagctcaagcttggactgtgtcccatctccgggtggctgggcagcagacagcgtttgcatctgagtttgaaagtgggttgtcttcagggtcttctgtcagtaacagactgtcatgctttccatgaactttatggacaaaatctaggctcagctgacattaaggatgaattttgaattcttattagggaagctgcctccctaacagataaatgtgttacagtatctagcggaccagtgtcattcacttctggaatcctcagggctcagtgccaaggtgacaggccatgctaacccattccccttctgcccacacagaaaccatgctcccttggtggtctcctggcctcttctttctctgtgatttgatcagtgtgattctcagccctttgctcttctttcatggaaccagttgccacagtccaaatgcccctccccatatttgggtgaaggatgagtctggttcagcaaaagatgtggtgtcctttgcccaggcagtgccctgtggattttccctcctcactttcctggacaagtactcaagcgttgggtcaacaaatgtgactcagaattgcccaggcccaaacatctctgtcttagtctgtgttcactgattacttctttgtaggaaaagtttatatttcagcagagatgaaactttctcctaacaagcctaattaaaaaaaattaaaaatagtatcaaaaatatagaaaaattcttttaaaaccacaattcactattggcaagatcatgggcatgttttgttttttagaattactgttggatttgaaaaaagtctataaaatttctttcaaatatagttcagagatttctgttgtttctcttgttgttgttgttattgtatgattgttcttaagtgctctgagtggtggcactaattaaccaaatgttgaagaattcatgctaatatagatgctaaaggagtgtccctgggaccaatcacactagatatctagtaaaaataaaaaacaaacaaacaaaaaacccacacttggaagtaattgtcaagagcataaatataggctgttaaaagcaggctgaatgatcatctgtagtgacattttgtttgtaatctatcaaataaagtttgtctgaagatcagaatgcagagctgtaccactagttaacaacacatctagttaagagctaagccactagttagccatacaggacaagtagtggtggccacaactttaattccagtactcaggagacagaggcagatggatatctgtgagttcaaggccaccctgggctacatgggagtgaatcagtctaaaagagaaacagagctcacacctttaatcccagcactagagagaatataaggcaggagctcggtgtggtctcagggcagtctgaagtcggtggagaccactgcagtctgcagtgactctgaggacagatagtttttggtcttttcaccaggttgtagtaaatttcctgtttgtatcctttgccaatttacgctttgtatatgccaaaagatttttccctatttgcatattaatggagtttttgatgctttttgcttcagagaaattttaaactttttataattaaatatataaatcttgacttttatagtttctgcctttggtctcctgttaggaaatctttctcccctccaacactgaaatattgactgaacattagcaataacaagaatggttacatcagctgttacagctgtttacttggttcatattatttcctagagaaattatgagtcagtaacgtaatagaatttacttaattctgttcttgatatagcagcctctgtaaccttaccttgtagatgagtaaactgtggcttggagaacttgtatgtcttcctgaaggacgccatgatctgtttacctctcaagctctgctagatgttggcaggaccaagggagagggataattccagggagatggtggtgtgtgagtgtgtggttcactagtcagccacagcagggccttcggacatctcaagggaagactaatccatcttccaggctggcaacagcaggagaggatgcccctgaatcaacttgtacggggcatcctttcacagtgtgtctgagatgagaaggtaattggaggagcacaggagaggtgcaaagccaagagcatcataaaggaagagaaattgcaaatattgtgattccccaagaaataagatatagtgtttgtttagttcatgatgcctcttctgtgcaaaataacccccactaaaagcaaagaaacatgaatatacacacatatacatgaatatacacactgcatacatgcacacacagacacatttgtatgtggttacacacacacagacagacacacatgcatgcatgcacacatacagacacacacatacacatgcaaacataccacaaccacaaagctgtattatgaaaaaggttggatagcatttttaaagctatgtaagtgagaaaaaaatcacttaagttgaattcccacaagccaaagtactgactgaagaaaaaagacaaaggaagagaagggcatactttcttattcctctgagtttttgtaataatttttgtttgaggatttattgctatttgactgtaagactgaaatagcccatcatcctttccacttttatctcatgtattgttttaaaattgtatttccaatacttacatgtcttgcatgtctcatcccacaatgtctgtctcaggcagctttgttattcttcatgacagcaggtgcagtaaaagaaaacttcaaccatatccagggctctggtggacctcaaaataaaagcaacaaaacacactggcaggggaaaagcatgcaagtatgtgaacataggtttagtgtgatatggaggcagtttcagaagcaaagacccagagaaatgtgaggaactgtattttttgcttatgcttgatggagcattggcagaagggggtgtgcttcagtaggaattaactggagagaggaaaacgcaaggcctgtgtgctctgattcctcttagtgtctctgtgttttcctgcccttttcatgggtgcaggacatggcacctgtcacgtgaggatctttaaagggagaagggagagaggcggtcagagacaccaacttgcttatactggtttctcaaatgacaagatgtcatattttggggcagcgtgccttgaaccctgccaacagtgtggttcaactgaattatggccctgacttcagatatacctcaagtcagtcctcagcagcatagttgagtgttagagttgcctacccaccttcgtaccttgacataactcttcagcccctcatccatagctgcttagattagttcttctattaaactaaatcagccataggttgagcacattagtctcaccttctgattgatacagtgtcagtgctaaagcaaatgcagagttgtgaatggagcttcagagaattgcaaagacaaatacagggctggggagccattctaaggcttttgtaaccctttgtgtggcagccacctactttgctggctgctgaggccatttccacttaagtgctttaaggacagaatagtacttgcagattcaaagtgaaattccagggaccatgcctgacattggaaagccaaacgggacaaatgaagctcattttgtcattgtgtcagacaacagacaagaagcagctgaatggagggagggtaattttggcttttggttccatggctgggaagccataatgcctggggctcacctgcagtgtgatgtcagcagatcaggaagcagagaagtgtgtgaggaacagggaccagactgtgacaccctatctctgttcccatggcctttactcaaccagttgggctccatgtctgtaaaggtctcacaatcactcaaggctgcaccatcagatggggaccaagtgtttaaacatatcacggggagggagggcagttcacattgaaatccttcacggatactccttagctgagcttccactgaatgtgagagcagcttgggactctggttttctacctcagttaggctggcagttgtttagatgccttttctttttaatgtttctcctttgcttgcagaagttgggattttcacagcaaagttgacaattgatgattcctaatttattgaccaataaatatcccagtgagatgaaatgccgtatgtaccagccacatctattttttttctgtattactttgacatctagggtctcaggagaatgccctctcctggggtccactgactcatggtgaggtgaacaattcagatatgagtgtgttttgcaaatgcagacaaactaatctagagtccatgtcctgagcccctcccttatggggctgtgaccatgtaggcctccttgtctgcgcccagcctgtctgtatttttagctgggttcatgcacctttagtggacaaaccacgcttttttgtgtgtccctgactaagaggaatgaacactaaccaccatctgtgggcttcggcctgtcaacatgaacttctctcagttcttgctggctataaccttgaaccctggcttcgtcctctgtctggtttgatggtttttcccatctagataataattctccagtctcattccgtggctcacttggtaagatggtggctcctgaaggctgaatatcaatgcttcattctgaggttgatgagcgtaggaatctgatttccttcttctgcatgtggcttctcccttgtctcagctccacgtcttgatgagactgacctttctccaatgtgtccttagtaccttcattgaaaatcagttgattgcaggtgagccgggttattctggggactcagttctctgtcgctggttcctgtgcctctttgtggcaatgccaggtgatttaatcactctgcctttaagtcaggtggcacaacatctctgatttttctttttttccaagattgctttggttattttgggttgtttgtgctttcatatgatttaaacattatacagtgtatacatatgtcaaaagtttacatggtgccccactaatatgtatcatttttatgttttcatgtaatttaatcttaaaatgcttctctctgcatatatctaaaattttatttgatgaatatatttatttaacatgctttgaactcattatagaatagaggtcacctataaattgaatttctcccaaaactccaaatggaacaatagatacaacaccctacataatttcatctttatttatttattgttccctttgcctgactacaggtgaaatcagggcaatgctcaccagcttttttcccttgcacatctttctgactccaggccaggaataaaaagaaacttaaccttcattaaagttttacatctttttcttctcaaaagaactctgtttttgtaagccagaaaattactctatattttttctcttttttttttgcaagatcacattaaaatctctatcatctatcataatagatcacctctatctctacctggctgttaaagtttaaagatcatttatttattaaataatttacaaaactgtacagtttcaaggtcattgttatagttgcaaataattttggttttgtcttgtcttggggatttgagttaaagggatggccagggcccacaggacattagatagcaggactgttaggatgtagctaccacagaggtacccttatgaaatcccttgtgatgctttgccattacatggtgatatatctatgtacttgaaggaaacctcttctgttgtaagattactaagaatatctccagtttctgggatcagttattcctcctctctatgcctaagcttcctgagtggctgagactacagacacatgccactatacccacctgacactcttctccaatgaagaacgaacactggcttttaggaagtgcttgtggttcctagtaacatagtttcttacctctcacctatccgtgtaagtaaattatattcctagagctgttgtgcatttctctagtggcaagaggtggaaactagccattgactagaaataaaagcaggagagcttggggacatggtaaataaacagagtgagatccaagtggtttgggggaacaaaatccagtagtgctgaggaacttggtaaaggcagggcaggggaaggcagctctgtcaccagtgcatcctgtaacttatccttggatgcctccatcacctcatggtctgttacagtaagcacctgccttgtctggctggggttacagattgtcatcattgttgggcatgagcaatgagagctctgttgagatggaggaagaatcaccccctttatgtcagtggtggtatttcaaaaagtttaggaagctttcctgagaaagaaaaaaaatgaaagcagaaaaaactgagtacatcaactgccactcagtccctaccttccctaaatgtcacagatgtagagaggatgctgaggatagtggtttgacaccgcatctccctgctattaaaaggcaagcctgtggaagcgggtagccgagtttcacaagcggtgactggttcagtttctccactgttctcctacctttcttcatatttacatctacatcaaggccaggaaatgggttagaaaaagagcttctccagaaccagtttcattcactttgtctcattctcagctacagccacgtatcagccagtaagtcttggggttggaatggctcctatgggtaacctgtcctgccgtgctttaattactctggtttaagtgttggactccctggggaggctttgtaaaaagagggtttgctctcttagttatatctggaaaattcttaggctaagtctttgcctctggctcctgggtcatagcctcaaatgtccataaagaagaaggcagcttacctggtaccctatccagatataggcaactcttatcacttatcacttatctctattatctgaccccatagccacggtgctatgacttaatataggcaatccttcttccctgaacactcaccagccatagatttaacatcagcaatttcaccatggtctttaaatgcttggcaaatggtttaacttgtaatcttgctgggacattaacttgagtaatgctttctgtgagctgacatatagaattgagtcacttaactcggatgtggacttctacagaagggtcactgtccattttatttatttattttttgtcttctcttcatgtttacaaaagcccccatgaaaagagcaaactgccatataaatgattttcatccctaatttatgatttataaaggatccaaaaagagccattaaagttttcagctgtattattctatttcatgacagaatagatgcccttggtggttctatgcattggctatttgaaggtcttgtgaggtatttgtaataaatgccaatgatcttctcacttcctcctggatgatttcctggagagccatgagcactgcctaagcaagagtttattactatgaagaagatatgaataaggagatatattggatcccataaagattttgacatgccaaaaatcaaataaagtaataccgcagagaaaaataaggcgtgcgactgggattattagcacttaaggaagcaagccagtggtgtgccatgattgatgtttgcttcaattttgtggttaagaatcctcaagataaatatctgtgtaggaatttatgtgagggagatttgatgtgtaacaaccattcttcaccaagtaaaatgataactgcattattttctgggtgtcctcctttgctccataattaattggagctagcttctgaggctgttcaatggtttgatgacagagtatgaattaaaggcagtaacaatgtaggtaaccgcctccaagtgtgtctcataggcacacaggaaaaatgtattcatggatgtcttttcgggattgacaagctatagcccaataggtcacatccagtactatttactcttaatcttcaagctcagaacaatttccctgcattttgaattagtttaaacaaagaaatggtaaaaccagaatattttgtgacatggaaagatcttattaaaatcctggttttagagcccacagtaaaattttattaggacaataagcatagtcatcaacttacaattcacctacataagtcagccttcagttattataatgaagtactgagcacatcaaagaaaagcttattttgagttaacatttcagaggcttgttttggctgatggtttcgcattatggttttagaagtttcagtccatgactggttgtcctcactggtttgaaactggcacccggcaaacaaaacctgctatgtcatggctggtaagcaaacaagagaaagaggctgtgtctcaccatatgatcctaggatatgttctcaattatcttgagtttttaccagtccctatattttaaaggttctaccacaccagataacatcatgctagagccaagccttaaccatgggtacttttgaaaaccaatctggatccaaagtacagagtgactctgtgatgctcatgctacatgctacaggtgagttggctgaagactggatggcacacaatgccagggagtcctgtctctacataagttggttatccatagtatagatcagggcttcttaaacttttgccacacatggccctgtttgcttgagaaacttttatgtgaatctgggtatctaggtatatgagacatatttacaaacatgaaaatacttactgaaaataaatcagaaagaattttattgtaaaagttatttggtgtattatgattttactacttaatagtgataaaataaagttcattttataatgcagatacagttgtttatctttacataacaaattaggtcttggttgaatatttgatacattagggcatagtggatcagtaatttttttcagagttgatttatgttttaattttataatcacaccacaatacacacaagtatgttgtataaattagcagaagtacatttaggaacatttctgaaattatttgaaattatgtgctaattctaagcaaaattcagtaaatgatttttttcaaaaagtgaaactcgtcaaaaacgcaataatttttacttctgacatggtatatacaaacttgctactcacatgctgagaaatggtaatggggaagtgtcaacagtctttggtctctgccattaagctaccgtgtccctagaagggcagcaagcttagcatgtgcagcaaaagtcttgcaattctcaacacattgtcttgagccaaagcccgagagtttccagaagtgtgcaaggcgttgcctggtttgatggtctgcgcattggccagagtgcatgctgtgggttcagaatcaagactgcagtaatgccattcagtacagcataggtgggtgctaccgaagatgccctagattcattcatttttgccattgtgtgttctgaaaacttttaccaatgccgaatttttcatgacccacatcagatgcacaacttgagatacagcattctttaaaaccatttctgcataggtaaggatatgaagaaggggagcccagatagccgcctgctccctggcaccatgtccccttcagcttcattggttctgagttatcatgatgcgtgagtgtgacgtgataggcaaggcttagctgcggtattataagaatgggccaggaagtgggagaatctgcactgtagtgtcctgaagccagggcatgtatactgtctagtaaatgcagagaaagctcaaaggactctaccttgcatgccactcctaggcctggagcatgggcttgagagagccaagagtggagagaaatggtgatgggaaggaaagatgtgcagggtgaagaagaaagacttgaatgtgagaggtgaagcaggctgtgttttcctgatcacccctgaattttgagtaaaggaccggtcagagtggggtagaagaaaggatgcaatgttgatgacgccactgtaattgataactgtccagactgactcattcaagtgactgaatatcatgcattcagatgaactggccataaggtaaggagtactatcagcttttgaaaatgtttcatgatagtaagagtagagaagctgaaatgcccatagtgaagctggattgtaattgtggctccatcctacccttcctctacctgtcccacctgagccatagacagtccgctgcgtcagttaccctcagggcacagaaggccaatgacaatagaaacactagcagaccttggatttctagtacttgtgggaaatcccgagttaaggggtgatgtttatgtgggtaacctcagtgaatataatttaccctaagtgtaactttagggtgtttcctgtagcagtcctgcaatagagggaactatattctatggcatcagcttgtgtgtgtgtgtgtgtgtgtgtgtgtgtgtgtgtgtgtgtgtgtgtgtgtgtgtgtgtgcccacatgagcatttggactatctcacccaaaacttaagggtaggttccaagtttgttaacttgctctcattttaaaaagaaatcccgaatcagagaaaggctgaggtagctgcttgacatgctccattgaggcagagttgtcttaagtttccaattgacatacacagacgattcaggaggctaatagatcacatggtctctaatgctttgtgaccccacacaataggggaagggccacctcaatgatggactcttggttggttaaattaactgtatatccttctctgcagatttgtgggataggcaagcaaagcaaagggagaatatcaggctccttacaacaaatactccttgatttttatgtttacaaagcaaaaggatgaagcattcgtgaggcaacatcttgcttaaaattccatattcccctgcttgcaaataaagacagcactttgaaatttactctcttcctcattggcatagaacattctctcaaaatgcagccaattgaaggcttgatacggcacaccctgaccccagattatctcataaatctcaccctgatgagttcctaaggggcacacttcacatagacgcagtcgaaccgagccattgggatatttacaattcagaatctcaagggattgcttcagaatgtgtctcagaaagtacaggtttatctcaagttcccacttggaggatgaaacagtaacaaatgccccccccctttccattgtttagtaaatggctgtaccagtaagggttatatttggctgcaatgtaaaaaataataggagcttaaataagttgaaggaatgcttatcctttatacagaagaaatcctgagacagactgctcaggctagtatgctggttccacgatcttctagggtgatctataatgctgttccaccatcgactgcacacattttccaaccttgccctctcttcattttccacaacggctactgagacaccaatcagtaagctttccctctatgacaaaaggctgtaccttccctgtgagtcagcttcctttttgtttatggtattgtgttgagacagggtctcattctgtatctcaggctggcctggaactcactatgtgtggacatggaagaatgttcttagtgtgttagaggctgcaggaagcacagggcccttcagctgccaggtgaactgtcacctagacacgggcaatccaaagcttcagttaaagtttggcttccatttgttactgagaatatgtctgagtatatttctttacttaaaaattaagattcctgttctatcagcaatgtttgaataggtgatgaattaacattttccctataccttggcctatgaactaaatgttttacatttaatacttcatatccctgagagctggatccacactcaagattttgcatatttaccaaaccttaaatatcttgagcacacaagctgtcagggttcaagcctggtacatctgaaatcccagctactcggcaggctgaggctaaattgtaaggtcaaggctagcctggactgtacattgagttcaaggccaacctgggcaatttaacaagaccttatctcaaattaaaacttttagagaagtagctgaggatgcagctgagtggtagagcacttgtctagcctgcacaagaccttgtgtctcatcctctgctgaagacgtagggtggatagggagagatctgaactcagtgattaatcaggcagatagtgttcaccctctcctgaaattgccttcttcctctgtcagatcctcagccccacgtctgaggatgctccggtgggtagggccatgccaagttttgggaggccttaaggaaggtgtgtgatttccagtaaaggcttcgggatggctttattgagggatacaaagaagattctagaggagggcaaattaggaaaattggggcaaagattctacaaatgatacattttaggtgaaaagtcacaaaagaagagacaagtttagtgattggtgcaggaataaggaagactacacagctcctgctcaggaatggggcagtgctgggagttgctgtctcccctgttccaccaagtgtgcacacacacacatccttcccacacacaaatgaacaattgtgaagactttggcttacctgtaatgatttttatagtcaaatcttttctgtctgagccagtgctatcctgtcaaaatcccagtgaagccatactaatggatggttggagatgtaacaccttgaacatgtctctagaataatcagaaagctgagaggctctgcactgtgtaggtttggattgtgcccaggaccagggttcttctcagttttcttttatctgtgaggccagggttcagcaaagatcattttcaggaaatgcaccactctgccaactagtaacttccattgtcagcaaaactctacagttggctcattctaacttctatttcagccaagaaaagatgcaagaattggagctaaaagggaagccaagaaaaacaccactgttctttgctcatggctggctttattgcagtatctgataggaaatatcttgatttttttttcctgaagattgaaatgtttctagggtatataatctttgggtaattcttcaagatattggagacatttagtggcaagccctttccccagactgcaatttgcaatggaagctcacatatcaaatcttatttattgtgcatatttctgttttattattatctgtaattaacatacaaaattgcatgtgtttgtcatgaacagcataatgctttgaagaacacagaattgtggaattattatatccagctaattagcatgggcatcaccctccactccatagcacagagggcagaacagagggtcttgcttgtgctaggcaactgatctactactgctgtgttaccagccacccttggtcctcatttttgaggcatgattctttgcttcaattcttttagcagcttgtcaaggaaacaatatatctatagtcacttatagtcactaacatggtcatcatgtattatggtagatctaagaagaatggtaacgcctagcatcaatagtcattttaggtgggttttcctggtgccaaagaagatggaagagacttctttctggtttaactttcctatgacactgtccagggccttcaccctcctgtctgttttctctctaaatgttgaaagtaagaggaagaggagtttgcttctgggcttttcttgaaaggcgggagagtggcatatgtctaacgtactttgctggtaagttcatttgtaaaatggaaacagatggaccaggaaacctctgagattctttgctgctctaagattctgtgattgggaaagtccaatttttcaaaaggggatccaagggtgattcaatttttctgtgactttgagcctctgggctttctggatgttgctctagaacacactaccctctggagcagaagctcagagtctgtcatcaccaccacttctccttgtctgtaatcagagatgccttcaaggtcttctggatctggctccaaggcaggggatgggtcttctgcagagctgttcactgtgcttcttctcagctctgctccaacttgaaattccttctgtattcatggctctctcccataacatcaggaggagttttcttaagatactgcttcactggtaacaaaaaacactaagaacctgttatttggtgatgtctcaagtaaaatgggaaagttgggacatcattacctgaccagcaggcactccctcccatcatttcccccacgaactggaactgagggctatgcttttccaactggggaaaagatattacaaatgtgtgtttgtcttaaggaatgtagtcaacaatatctcctaagataattccatttttaaaaatgggccaaatatgaagagacagactctagtacaaccacaatcatgtgaaactcacatgcgttatttcatgtatcaggaaaggggtagagggatgagtggaggggtggaagggtggaacgtggtagggtggtggggtgggggtcttcttagcagtccttagcttttgaagcaaggagtctgtctgatatgtccatgtctgattcttctcactggatctaattctatatagttcaatccctaagcaaattctttagtccacccatgctttccaagaacctcccagtgtctatgaaaacttctcataagccagctgctccactaaacagataaacctccaagatgaaattgtatagtcccaggttaatatcttttccttgctttgactcatgttttaatgatctccctgccaaagaggcagataaaataaaccatccattttaatagcagttctcattatcttaggaaaatccaccaacctgggactaaattccatctcaaacctagtcctgacttctcaggatgcacctcccagtcagtgtgggcctctctatcaagtaccatctctgcatccctggctgacaggagctttgggaggcccctactcagttaggggtggaaaactttagtctatttcagaattgctaaaggctaataacaacatctcaccaccctcactcttaagctatctggaaaccagagaaaaacaaaatactatttcagctgtctgatgcagattcttggatataaaacaacagcaaaagagaaaaaaagaaaaggatgtgatgtttagagtcaggaattcatagtttaagttgacaatttagcaattatgtggtcacaaataattaataatgaccacggcagaaaatggagtgatgtggattcctttttcattggcagaaatgaattacagggattaaaaacaaagcaaaatgcaactccatgtgtccctttcaacctcacagcctcctctttttgatttgccctgtgcctttctccttgaggccatgtgagaccagaatgtcccttaccagacatcattaacaaatgtgattttccaaaggattaagaatgaattaatcaagtggacattggggtaaaaatgtttttctgtgtgtcttagaaaataccagacaagagtgtgaattcacaataattacaaattatacaattcaagcacacaaaactacttaatttcacagaaggatataaatatagtatatatatatatatatatatatatatatatatatagtatacactatatagtaactatacatttacttctgtatctatctatatatatatacatatatccttttcctgtgaaattttgtgatatatatgtatatatatatagtgtgtgtatgatatatatctatcaaaaactaccacatagtatatgatatatatgcatatatacatacaacatgcatatatatgtatatatatatatatatatatatatatatatatatatgtttctaaattaactttgagaacagcacatggttttgaagccttgggtgggctatcttaatttcaatatgaagagaaagactagacatgcttctgcatttgagtagactcttcttttctctatgatcagtatttccagggctggataggaatgtatataagtagttgacaatgacaatcatttcattgcaaaaaacaaaattgtcattctttctggttctgtcatcttatgacaccctcttgttattgccaagacatctacactagtcctgttgtgactggcttccagcatcattggctgtcagattgttcaagttatgacttagttttcaagcgacctagtaaacttaagatactcatgtgatttgagtttaattggagggtactattgatgtcgttgaatatcccccatgtgctaaagtcttgatctccagtatggcacatggagagtttgaacctgtggaggtccttcaatctcttgtaagggtctatgggaccctggccttctcctcttccatttctctttgttctctgactgctgagaagatcatgctatttcctattctcctgccgctatgtgctacctctcctcagacctaaaacatggagatgggacaattagtcatgagctgaagcctccaaaactgtgagcccaaataacattttcctctttataagttgatgtcataggtattctgctattgtagcagaaagctgactaacacagaagacatggaggaaagtttagttaacatccccagaaaatattaagataaagggttaagtttatgtcgaatccagttccctctaaagggttaagtaatgtttaaagtgtttatgtgttccatgaagagtggtgagagaagaatggaagctgaaacgtggtagatcttgcagaagcctttggtgtctgtggtttgggcacttttccttgaatgggctgttccagggcctttctctcaccactttccacatcaaccacaaggcacaggcatttacaatttagcatgcactttgtgcacaagtttttaaaaagtaactattttagattggtaagggtctcacatgcttgtgtgacttttggcagaaatgttggatctcttctggaaataaccagcattatgtatcttgagcctgtggtgaacttcccgtgtaaatgactccacactccactctgaagaagcttcgcttgccctccccccctcaacgcgagtcacccattacgacccatagcactgccatcctgtgctaaaagaacatgggaacctcctgccatactagagtgagaaagttagatcgcttgtagctggggttgacttctggggatcttgaacatggattgctagaccacttccaaaagttctgagggccagactggcaagatggctaagcaggtaaggacacctaccaccaacctgatgacctcaggtcagttttcaggacccatagggtcacaggaaagaactgtctctcacaagctgtcctctgacctgctcgcgtgtgctgtgcagctgtatccccgccacagagagatctgtgtgtgagcgagtgagtccgcaaggtagggtgatggtggtttttgtctcatgaagtgagaggaggcttaattcttaccaaggaaagttaatgagatgatgagatggcctctttacagactacttcatagcattctatgaaatgttttcagcttggtgttttgtattgctggaagacataaaattgttttgtttggcttgttttgggttacagctgtagtttaagcaaacttcctgctttgtctcctttatcttgacaggttatccattctggaaatttatactgattattgttcttctaagtcattcaattcttgtcttttcactcttgaatggctttttaaaaatgaacttcactattaaaagaacccccttgcaaataaacaaaaaccacacagcaaaattaatcagatctgaagtctatagaacttaatgaacttaggcacagacttggcattcaaaatagaagttgcaaattgacattaagtttatactttcagcagtgaatatatttttaattagatttatttattttatgcatataaatgttttgtttgcatgtctgtctgtgcaccacatatatgcctagtacctgtggagttcagaagagggtgtcagagcccctggaattggagttacagatgattgtgagccaccatgggggtgctgggagtagaacctgggtcttctacaagaacaaaaagtgctcttaactttcaagccatctgtccagccccagcatcaagtgtactttatgcacttatccatgaccaaagccaaaataagtaagcaaataaataattcaagacaggtttgaaactagaaaaccaattagctttgtgtcttcattcataactcatgtccatctcctgccttcagtccttcctcggcctttatttagcctttcttgttctctttccttcattttatcctatgcagacatgttcacatatgtgcacatattcccagctagagtccacataggagagagaacatgcggtttatttcttctgagcctgtagaccctgcttaatttggatgggtttatactctattctccttctgtgccacacattgctcatttcaccagagatttgtttattagtttttcagtgtttttctttgtattgcattttaatattccctttcataacatctgctttaatccttgtcattccttccaccttcttgtggtgactttttggcccagctaagatgggtgctctgcctgtggcctttagactttcccttctttgttctaactgaataaagttgtaatttccatgtatttaatgctttcatctagatcagaaaccttgatgtgaaaccaaaattgagttttaacttccaattttaatcaaatttcttcttggactttaagtgatttaaaaatatgttttaaatgtaatggctataagttaccttttattagtcatttgtaagttgacagtattatagtcagagaattcatagtatagtaccctaattttaaaagactaaaaacttcatttatagtttagaatacaactaaagttcatgcatggtatatgtatgcttgaaaaaatattattacacacttctttggtaaatttattttgaagttagtataaaacttcatttcattgtttttatagtattatttttgctttattgacagttttcataatattaccttttgctttattgatagtgttttcatcttctttagccatcttcttcagtggtccctgagccttgagagcagtgagctgtcatctgcctgtttctctctgtatgtatgtatatgtgtgaatgtgtgcctgcctgtgtgtgagtatatacaagtgtacatacctgtgtgtgtatacaggtatatatatgtgtgtgtgtgtgtgtgtgtgtgtgtgtgtgtgtgtgtgtgtgtgtgtgaatgtgtgtgtaacaattctttctctggactgctagatcctgaataatgacttggagacttcttattaattaattaattaattatgaaagcttggccttagcttaggcttgttcccaacaagctcttaaaacttaaatcaacccgtttatattaatctcttctgccacatggctcattaccgctcctcattaccgtatgtctgacttcctctgcatctggctggtgaatctctcacacctctgattctttctcaagagtttctgcctcttgccaaaagtcctgcctatcctctcctacccagctgttggccattcagctctttaaaccaatcagaaggctccttaggttggtgtggttaaacacagacacatcttcacacagtgtacaaaaagattatcccaacatgtgtgcctgcctctgtgtatgcatatacaagagtacatacatgtgtatgtgtatacaggtatatactcctgtgtgtgtgtgtgtgtgtgtgtgtgtgtgtgtgtgtgtgtgtgtgtagggtacaaacctatgtgtatgcctgtgtatatgtacaggtgtatcacttgtgtatgtatacagatgtacacagctttgtgtgtgtgtgtgtgtgtgtgtgtgtgtgtgtgtgtgtgtgtgtgcaacagaataagacattgggtgtccccctctaccttctctgaacattacttttaaacaaggtctttctgaatctgaacctgaggttctctcttatctctgtcttactgaaagccagcaagacagtgatctcctgtctccgtgctattcaggaatttgtgaagatgcctggcttgttacctcggtgctgggtccaaattctggtcctcatgcctgtggaacacatgctcttaaccactgagtcatttctccaaccccaactctgtgctttccaaggtttaataatgctattcattgttggatacttgtttctattttaaagccttaaaatgataaatgatttactaaagagtaactaaaagtaataatgaaaatagaacagaaaataatttttaatacctttattcagagatgaccatagttaacactggtttttaatctagtttagaatttttaaaaacacacagttgtgttataatttggatttaaaaaaaaaacatttatttcacttagagccagagattccaaatttttgagcagtttctaattttatatttttcaaactagctttaataaactcccatttaaaatattttcttagtattcatgtagaagacagccagtcatgtatgctggagctacaataatggatgctgcagcatcttcagccacagacaattaacaaaggatatactttgttattaacactacaggatatacaagtgcctgtgatctactgaagcagagtagaaagaaaatgaagaaagaaaatgagagagaaagtgacaagaacagatgggagctgctgttttagaaacacacatcacagaaggctgaccctaggtggaccgctttgggagagacttgaatgcgtgctgctgagtgatgggcacatgggacgagggtttcttgtagaagacacagcgtgcgccagtgccctgggtgcaggaggctgcttggtgcttcttttcacccaaggttcagaggaaagaccaaggtttctgcactatggggctgactgggacagatgtagaaggtgtgtgtgttgttttcaagcacagcgggaggctgattgggtggtgtttgtggggatgccctggaagaacagcctctggcttgtgtttgggagaggagaggagaaccaggaagacccactgttgctgatgtcgtaggcagagtagatagtgaattgagaagctggaaaagcattcttagcttttccacaaaagagaatgagggaggggcatggtgatccggaaaaaacaaaacggtaacaaaggaaaaacaaaggggaatgtgcatgcgttaccatcaacagtcatccccacaccacagtaaaccattggtttctcatcccctttcatcactacagcaactacatggagacaagtaggatgatttctctcatttgtaggtgaggaaatagagctttgttgagataccgggtttcaacacgagctgcactgcagtcagctcttggcactgcaggctgctcttgtcacagtcgaccacccgtgcctctctttatcatgttgtgctcttcagtctttagcaccgtcacaggaagagtgggcaaatggctgccagactgaattagacgaggaggacggtgtgtgtctggtgggaactcagtgtctcggagatagtgagacagatgcttgccagctagaaagtctgactatactgtgttctcatttaataagccttgtcctacactgtatgctattaacactctgtcttggtcctgccagcttccagctcaaacaagttttctttcttagagccttaggtggaccattcatctaaaccttgcttgcctcatcttagtgtgccatgttatgtaagcctttgctctgctgtgtttgggctgttactagactcatggttaattcatattagctagcatttatttagtatttacagtgagccatgatccatgctatgaacttgtcttctatgatttcactctcagggctagatatttctggaaactttctgtagacagtgaagctgaggtatatgaaaagtaggtgatgggttgtaaatctagtaagttccagagactgggtaaaactgagagcccagcctttcccacactttctgccttttgtgcaataaccaccactgtgattgctgactcaatctgtgcacttgtcccagggagggagaaggtggatgtatatatttctggatggcctgtttattttctttcctatctctcactctagaatttcacgcacccattcatagtaggttgccatgtcccatgtgggttagtccagacttgatgcatttcctgcagcatcaactgcagaacattccttttgaaccctgctcacgcatatttctcttctctgcactcttcagttagcattccataccaaatgctcttcacagactggccttgcccttcagacaaacaggcagtccgtatggaacatgtacataaagtcaaaaaggtagagagctggggctagagagctagttcagtcagcaaaacccttgcatgcaagcatgtggacctgagttcaaaccccagcacccatgtgaaagagttggttatggtgacacatggctgtcatcccataggtgggataggaaagaaaggtgaagccccatgtcccagtaagagaccctgtctcaaaacaaacaaacaaaaacctcactggggtcaacaagatagctcagcaagtaacagcgtgtcactaagcctgatgatgtgagttcagtctctggaacctacatgatggaaggagaaaactgacttccacaggctatcttctaacctccacaggcatgccatggcacgtgtgtatgcacgtcaccctggcaggcatggtcagggtgaagtagagtgagaggttcaggtggctgggtttcactttcggtttcacttttgggcttgctgtacagactgctgctgcgccggctggctaggtcgctctgtaagtaaggcttttccctattaaatacccttgtatttctacctgactccgtattggtaatttcccactttatggtggtggtggcacatatctttaatcccagcactcggaggcaaaggcaggcaaatctctgtgagtttaaggccaacctggtctacagagtgagttccaggacacttaaggttacacaaagaaactctccctagaaaaaccaaacacacacacacacacacacacacacacacacacacacaccatgtacacacacatgcacacacgtgcactccctaagtcccactgacagaatgtaaactaacacatctcttctctttcctcagaacctgcatgggctccagcaccaaggcaggatggccacaggcttggagggggctccatggtttctgaccacaaagggtggtagatgctttagagaggatagtgtttgtcaggactccaggcccacagagatgctctgtttctgggctactaatttggaatgatgttactgtggtcattttcagctccattaggaaacctaggtagagcacttgctttatttttttccttttgtgttattgtgaatattcttctcgctgtccccccaaaaatgtatgtctcccatagcctagcagcttatttgcagagaagtcaggcaattctggattgccctggagtgggtatgtccccactgtccacaatctcagatcttctgagtggcttttcattgcttgagcctcagaagtcagaccctcagaatggcacattcattagtatgatctcccagggttcccagttccttaccttggcagactatatcagaatcacagtggccatgcaggaaaatatcagccaccctggtcataccccagagttacccatcagatttgatccgggctctgtgttttaccaggtttctgtgatgaggtatcttggtactatccatcggtctctgaggctcctgcttcctcttatacttgggtcttctctactataatggggtcccctgaaatcctaaccagaagtttccaagcaaaatggcttccagtccatccactttccccctcaatcctgtctccccaattgtccttgctttgttttgacccctgcttatggaacttggcaatctcaactcctgacatctgttctctgccacattgtctctttctccctatacataagcctctcagaagaatgctaattctgaattttcctatgcatctccctactagacacttctgcattcaaagcagaataatttggatcacaaaatgtgcccacaagtcacatttaattcgttatcatgacttcgtaggggtggagaacagtcctctcaggcacttatgtaaaaagctggcctggtagtgtgcatttgtaatcctagtgctaagaaggaaggcataggagggtccctggatcttccagcctcactgtatcagtgaaagatcctgtctcaaaaaatgggaaggcagagggagaggggggacgcagagtggaacatgacaccttttattgatatctggcctccagtgcttacacacttgaatatacacacatctgagcacacctgcaaatacaagcatatataggccctacacaatttacatatttcatcttgaatctccccagcttctcctctatttccccactcatcttagagcaatacttttgtgagacttgaatgaatttctcctgtaccttttcatattcctacctcatttctctttgaggcttgatcaactaccaaagtctctgatgaggttctcaacagaatccagtgtcacagctttagcccctttcggtattctacatctccaggacgtggcccataggattaaacactcttgccgtctttacaatccctcctgaggctccacagtgtgctcgtctccacctaagagcatggattggattttccttactaatctcctgtatcaaaaatcaaggagcaaaggttggggtatgaccaaccaaaggaggaatgggaaataggatgttaaaggcattgtcaccattgtagacctttgctttataatcagaagggacgctgtgatagaatgtttttggtagaaatgactaacattttgacacactccctctgggtccctgtgttaagaattacgtaaaggagtaaagctgagatctcaactagaaggttatcacagtgtcggaatctagctggagaggccatggtggctgggatggaagaagcagtggagatattgagaacgatggctgctggtacattttgaaggtagagtggggaattgctgacagattgaaagtagggttggggaggaagggagggaggggcatattgtagagggcaaaaggtccttgtgctcaccggtaagcaccgaagaaaccaggtatgttaaacacgcagggctgtctcttcaaagaaagagacatttaatctgttttccacccagaaggctgggaatggatgtggttaatagcccagtgacatctgtgctgtctgtagggccactacacctgacacccctagactcttacgtttatctcagtcattgtccctagatttttatcttgagccttgtttttcagtcaatagaacccatctttatggaagaggtgatatttactttgtgacgtttcaatgtaatcatgtcttaagttttgttgtacatatgagattgagttaattattatcaagaaacttctatcccaaattgtgtgtgcttaactaagcctaaaataaactgccccgtgtcagactctagaagtctgaaccagcaccagctactgagtcatgttgaactggatttcctccttgcctcagatggattggctgttgtagtttaagaaaagcagccatgagaaagatgccatgagagagggttcaaccagagggttttattattattattattattattattattattattattattattagggaaaggggaggggggatactgacctgcagggatgggagcagcaggagagaggaaagcgggagaaaagagggggtgacagagacagagagagaaagagaggagggagggagggaggagaaggagggagagagagagagagagagagagagagagagagagagagagagagagagagagatgggaggagggcagggccctttaaaaagggaacatagtgaatatgcacaggtggtgctcttagtggctgaagctgagggtgtatcctgtcagaaccccaaggacaggccagtagggatgcctgaatagtaacattgactctctgtgggccctgttggtctcagagaccctgacagtatagtactactccaatattttttgtttgactaactggaaagattaaggaggtgtcattgactgtattgggttggatgagggcagcttactgggggcaaggcaggagttggatctcatgccattttagagacatataaataatatcttggctgctatccagctctccgagagaccagcctggtgacatcatcctatcaagctttatgggatcctacagcagaggcctagctaagccaagcccagactcctgagcataggaaccaggagatgataaatcaccactaagtctctggcagcatccttacacagcaataactagataccctgtctagaggctgtccagtgcagttctgtgtcactgaatggttttgttgttgtattgaagagaaggtcttcagtatatttaaacggtagacatgccagcatagcacttatgacataaagtaaggttggtttcccttaagatctacacttcagggattgtaaggcttacaaaaaaccctttctttggaaatgtatgctttatttccttttctgctttgtgttttatccttgttgaaggtcaggagtctctatctgcttgattttttaatactgtatatttcatattggtttagccaaaggtaacaaaaaagttccaaaataatccataatcctggaaaatggattttgtctgacacatgggacatggcacttgaggagattgcaatttgtgtatgtcagacaactcgtggcgagggagagattgggaaaatctacttgttttgaactctaaggtaatattcataatgtttataattatgtcacagaggaattatgatggcaagagatgcttggctcatgtaggtgtgtatggactgccaaggagagtgccgtgcctgtgttttcagagacatgggcagacacaagctcccacttgcttgtctgatgtcacacactctgtatacacaagggaatgttaaagcatgtagccaaatggaaaagttagctgctatcaatcatcccaaatgttttgccttactgatggtgaactgtttaactgacagactttcaaaggtatactttttctgattgcattgattttgccagagcctatttccttatcttcccaccccattaaaaaattaaatttagtgtcattaatttttcacatggtaaattattttcaaccaactcatacagccactttggaaatcagtatggcgactcctcaggaaaatgggaatcagtctaccacaagatccagcaattccactcttaggtatatacccaaaagatgcacatttatacaaggacatctgttcaacgatgttcatagcagtattatttgtaatagccagaaactggaagcagcctagatgctcctcaaatgaagaatggatagagaaaatgtggtacatttatacaatggagtactactcagcagaaaaaacaatggaatcttgaaatttgcaggaaaatggatggaactataagaaaccattctgagtgaggtaaccaatcacaaaaagataaacatagtatgtactcattcatatgtgggttttagacctagagtaaaggattagcagcctacaatccacactgccagagaagctagtaaacaagggggaccctaagagagacatacatggtcccctggagaaggggaaaaggataagatctcctgagcaaattgggagcaggggaggaggggggagggagctaggagaatgagacggggagaagaggtggggtgaggaggacatgagggagcagaaaggttgagttagggaagaatagaagaaaacaagaaaggagataccataatagagggagacattttaggtttacagagaaatcaggcacttgggaaatgtctggagatctacaaagatgacaccagctaacaatctaagcaatggaggagatgctaccttaaatgccctctcctggtaaggatattgatgactgacttatatgccatcctatagccttcatccagcagctggtggaagtagaagcagacacccacaactaatcactgaattgaactggaatccagttgcaaagaaggacgagtgatatgcacaggggtccagaccaggctggtgaaatccatagaaacagctgacctgaacaacggggagctcttggtccccagactgatagctaggataccagcaagggactctaggaacatggtttcagtgaggagacctcggaaatctacgggacctcctgtagtagttcagtacttatccctagcatagatgtggactttgggagcccattccaaatagagggatactccctgagcaaagacacacgggggtgggcccaggccctatcccaaagggtatgatagactctgatgactccctatggaaggccttacctttcctggggagcagaaaggatatgtgataggtagggttttagttgggaggagtggtaggggaggagggagggagtgggaactgggatcaacgtgtaaaacaatcttgtttctaattcaaataaaaaataacatataaaaattctgtttctgaaaggagacacaacatcatggctcaggcagaaagttagaaaccttttttttgtttgtttgtttttttccagaggctctgttcaaagtcatactgggtcagatggcagcagaggaattggtccttatttagaacatttgttactttagtgtgcattactgctgtagcataaagaacttaaggaggtcagcttcatgttggtttactgtttcagggggctcagtttttcatgatttcgagggcatgcattgaagccccaggaaaccaagagtgaactgaaaagaagactagccttaacctccagaggccagttcacaatgacctacttctgccagccaggatctaccttctaagaggtctgtaatctctaaaaacagcaccactatctggggagtaggcgtctgaacaggtgaccttgtttgggagacatttctgattcaaactatgacaattgtgaattagggccaggttgacagctatccccaaagcaaaggatgttcttcagagacttggtcaggatgcactagaggtcaaaagcatgagagagaccacttaacatcattttgtaactatgacttaaaaatcaataatattaattttgaatagtaaatgtctagccaaaaccagatgaatctgggtcagagtcatacaacgaaaaacaccatctccaagtaaacaatcgtgagagtgtatcacaacctcagggacagcagttggcagctcagtcacttcaggtctctaacaggagagtcctgtgtgaagctccgcgtctgttttggatgtcacatgcctaccagcatggcagacagttactaactgactcatttataggatacctattagcatattcaacacacacatctaaacagctggctgagaggctggagttaacctttccattacaaatgttgggaggcacgggcgtgcataaatatgcttgcttggtttgttttaggttgctgtacttataataatgctggctgggaagatgttaccttccaaaggagttttggcaaaataactgctgaatacatgctcaacaagatgtatggggcatttagcaggcactatattgatgcgagaaatgcatggtcatgtacacagatggaaccgtgtctgaaagagccgattgagaaccaggtcattccacaaccagactggcagtacatccaagaaaacagacctcgtcacacctttgaccaagacacctccccctgggaaagaaagcttcccacattcctggtgtgttcatttgaaagtgtgagacccagatcacagtttctctaaaaacacttgcttaaaattataatcttttaaggaaaaaaatcgtcagaaccactgaaaggcctttgaaagctggcttaggcagaggcaagtgtttatcagaatttattttccctaaatggacctcaggagtgtaatcttggtgaatcatcaccatacctcatgtcatcttgttatctttaatttacccataaaccaattttatgttctttagttaagaactcttactaattataggatggatacctatgaactcaccacccactatgagaatggaagttagtaacctgcatctgccagggtgcttttcttcaactggttgccctgattcctctagcacattctgaggttttggggtgctcttacataaaacgcatgcatatgcatatctttcaaaacttggttgaagccaagtatggtaatgcatgccttcaacccctgtcagataatcccaacatttttttttttttgtcatcccaatgtcagcatatactcattgtttgggtagttcatccttgtaatcccaacattcaggagttttaggcaagaggatcaccgctgagtgttccagactatcctgggttacagaatgagatcctgtctcaaaaaccaaaccaaacaaaaaccttggttaaagctgggcctggttgtctagccctgtaatcctagctattcagaattttgagccaggagaattgcagggtcaaggccagtctgggtcatttaatgagaccttgtaacaacaacaacaaaaaaagtacaaaaagactagggctccaattcagtagtgagattcttgcctggcatatggaaggctcttggtgtaatctcccagcctggaaaaaaacaaatatatctagttgagagcttcctggcttttgatttcctaatgaaactccaatgtctgggtcctgtgaaactgaacattaattaaccttgaggctggttgcttctgacgttactcttgtgggggattgagagtaacaccttgttgctgctggatggggtgactattgggccctactcattcagtccttaaggacattctcaggatgctgctcctactgctgctggttgagacaggacgggtgttgagctcttatctgatatgtgtatgtagggagtatcatctgtcactgagatgagtgtagatgttcagcatatcatcccatccacggactctactccactgacatcctggatgctgactggagatgatagaagtcatggacacagttttagccatttctgaccctgtctagagacaactgggaacctggttctagcattcaagagagtctaggtatatcactcagtcctttcaggagtggataagtatgagaagaaaggttactctttatttttgtctccacacctaccctgtgctttttgactagcctagaatagttattgtctgaaaggttctggcttgctgcattgcatctttcctactcttaaagaaagcaagcttccattagggctgttttgtccatgcccatgggcatctacacagtgaattttcagcttcggggatgtattaagcgaagagaaaacctgtggcgtgtcctaccacaccatttttctgatggcaagatctgcaactcctctgctgcatcacttccctctgttgttctccggggaatgtccaatgatagtagaagtactcgggtgaaggaataatgaaaccaatagcagctccatattccattagtaaatcgatttctttagaaaaagagcagaagtgagaacaaatttcaactctctctctctctctctctctctctctctctctctctctctctctctctgcccagtattgatttgctaacgaaaccaaagatattaccagaaaactagagaaggtatttttgtgaatgtagacataagaatcatcaacaaaatgccatcaagccaaatctagtgataaacaaaagggattatactagggaaaaatggaatttgttcccatggggccaaggtattctgtaatgccttagttacagtttctattgatgtgatgaaatgccacaaccaaaaggcaagttggctaatacttccacagtgtagttcatcattgaaggaacccaggacaggagggatcaaacagggcagaaaacgagacaagagctgatgcagaggccatggaggagagctgcttactggcttgctcttcatggcttgctcagactgctttcttacagaacccaggaccaccagcccaggagtggtacaacccacatttaagaaaatgccctaaaggtttgcctacagcccaatcttacagagacatcttcttaagagagactctagcttgtgtcaagttgacatagaattaacttgtacatatagtatgggatatcagtagggcaaagagcaaaagccacatataggaatctcagtacacatagaaagaacaattgtcgaaaaccagacaccctttcaagttagaaatgctcaaaatgctgggaagaaaagggactttctagaacagctgtaaccagcaggcagagaacacatttcccagtgggaggctgacattttctccctaacacagggcaggacaacggtgtggattatcaccatttctcaccagcgctttgctggaggttctaaccaggaaagctaagaaacaaacctgagtggaagggctcaaaacttgaatgaaagacggtctccatttgcagatgacatgatcccatgtataggaaatatgaacaaaaatctgttagaacaaataaactcagtaaaacattttcttaaagtgacatcaaataacaatcaaagcaaaaagagataacttagatttcatcaaaattcaagtagtttgtactcaaaatattcaaagatcgttattaaaattaaaagccaacttaaagagtaagatagccaggtgtggtggcacaaacttctaattgcaggacttgcaaagtaatatctttgtgattttaaggccagtctagtctacatagagacttctaggccagccacagctacatagtgagaccctgtctcatatatatatatatatatatatatatatatatatatatatatatatgcatgcatatttgaaaatcatctgacaagagttttacatgcagattatataaaaactcttatttctcaataattttttaaaaatgacttaggactcaattaaaatgtaaggaaattagtttaggaatcaatatccaaaacagaaaataagtacattaaaatgttcaatagcattagtcattggggaaacacacctcaaaaccacactgaggtacacctcaaaccatgatggtgtctgaagctagaagaacagattagagttgatgagaaacaggagaaatctggagctttaagcactgttggttggaaagcaaaagcccaaaatcaatctgaatataaatagcatgtcatatagaaaagtttttcaaaaagttgtatatgaagttaccacatggtcccaactattcctttcttcacacaacttgtacacgaatactcatagcataatgaatacaacccaagtgtctgtcagttgatctagtgaaatatcatttgtccataaaaaagaatgaaacactgttacacatcacagtgtggatgaactgaactgaactgaagttcaggcacacaaggccaagtgaagaaagccagacacaaatggcatgtgcttcatgagttcacccatgcacaatgtccaggaaatacacagatgttctgtatttcattattgaccaatgaatattgaaaggaaactagctttgcctgatagtggtgagaaaggctgtttaatgttaagccacacatttacatcttgaaaaagaacaaaaacactgtgcactctgaagggaagaagatacctaatttgctgtaagccattggcatctatgcgggtgtcagatctattgaggtcttttctccctctacctgaaaactgtatttttgccagaagtgtttggggaacgtcactcgtattcaatcaccttccatctgtgacttgacatcatagccgaagctgaatgctagttttaggaagatttttaagcttgtctaaattaacacctacagattacatattgcctattgagtttttgtttcttttccctgagttctcttggtgttatgataaatctttccgccaaagtcactgagccccacggccacgtgtgcactttatgccagccacccgcccgagttagggccccaattaatgcacagagagacttgtattaggtacaatgctgcttggccaataactaggattcctcatctgttagctcagtcttaatcatcataaatctatatattttataagacttatcttatagaggatccctttcgttggcaccttctcttgccggtggctcacattctgccgctggaggaggcgaaggggaaaaagggacatttcctttttctcctttcttaaatatgagtctccttgttatgtcacttcctgcctggatcagcacttctctactacatttcccagaatcctctttgactcctagtcctgcctaacttgctgtctcattggccaaacagtattttattcaataatcaataagatgaacatatacagtacattccccagcactcttggtgccttttcctagtgtcatagtttctgtcaacttgatacaaacttagtcataactaggaagagaggatctcaactgaggaattgtgtctatccaattgacctgtggaagtgtctgtcaggcattttaaaaattgctaattgaggtgagagggcccagtcctagccctaggcagatggatctagactgcataagagatggtagaacaagccagagggagcaagccaataagcatggctcctccatggtctctgcttcagttcctgctgctagagtcctaccttggcttccctggatgacgagctgtaagtcagataaaccctttcctcctagaattgttttctgtcagtgttttatcacaacaacagagaagcaagctggaacacctactaaataacttttacagttcagattttaaaaatcagatctcctggattttcatagctgcttgattgtggcttctggtaccaccccactggagcatttttttggttttcaaatttgtgcaaatctaacagtgctaggtacagtatggttgtcaaagagttcccatctgtactgtctggatttgtgaggtaacttgacacaagctagagtcatcagacgagggagtctcaattgaggaaatacctccatgagatccagctgtaaggcattttcctcaattagtgatcaatgtgggagggcccagcccattgtgggtggtgcttccctgggccagtggccctaggttctataagagctcaggctgggcaagccatggacaggaagtcagtaagtgttgggaccctgctgggtgacctaaggtgcccttggtgttctctgtctgcctcatgactaggcgttcacttccttgttccctccttccacctaggcctgtatgcaagaaagcaaactatccgcccatttggggggggagggttgggggttggggacatggaccttgacctgagtaaatttccactgtggctgctgttgatatatacgtctactcccctctgaaataaactggcattctccttgcaagaatgacccgttgtctttattttaaccctcagattccctagcccaaacctgtaaggagttgtaacactggccgttacaagtaagcactacccctccttgacctctacatcagcttgtatctctaggctccagccctgcttgatttcctgtcctggcttcctccaatgacggactatgatctggaaatataagccaaataaactctttcctctccaacttgctttttgctcatggtattttgttgcagcaacagaaaccctaaccaagacaccatccttcttttgtagtttagcaatatttgtccaaatatttggctttatcacattgaaatgtggtgatgtaggaggcacacaatgtagaaattaatctcaaaatactttttcaagggagaaggaagagggctgatttcatggcaagcatttctggggattgctgctaacttaaaatttgaaaccgattctccaactttcccatctgctacatgctggattcatcccacaaatactaagtttaatgaaacatatattttgcatgtaaaatatcaaccaactcttgcctggctaaatgttgactccggtgaatgaattgctacccagctgtttggtggcactgcttctcatggtcgttaatttcatttgcatctttgaaatgctttttggaacatgtagggagaacatttggtctttaagttgaatagatcactgataatcccattagcaagctggatgttcactttcatttcatagatggtttctctgtgcttcttgggggaatcctgggaatttgttgtctactcagcattctgctcacaatttctgagataaattgataaatctgtgtcatgaacactcgtgtgaatctgtgtgtttgaaggatctggcatccttgagggtgatgaagtagaggcaccagtcagtgtttgtcacagtgatgctgttgtaataaatgctcctaatctcggggttattgtattggtttgaaagaaaatgcctcggaaatgagtggcactattagaaagtgtgtccttgttggaggaagtgtgtcctggggtgggggcggggcggactttgaggtctctgttctcaagcttcactcagtgtgacagtcagttgactttctgtcgcctgcaagatgtagcagtctcagctccaacaccacgtctgcctgcaggccgccgtactcccagcatgatgataatggcctgaatttctgagactgtaagccagccccagttaaatgttttctttataaaagttgccagggtcatggtgtctcttcacagcaatagaaaccctaagacagtcgtttaaaggaaaacatctatctctgtgttatagatatgttaataggtttgtcctcagctagacttggttccaaaccatgggcataaatatctgttcactattatctcatttttctgagacaaataagaacctctcccctgttcagcatgttcttttcatactgatgtcagggtgcaaggggctaagatgatcatgaaaatactgcaggtgataagttattggttcaggaaaacagctgtattaaccaaaatggccattaaaatataatctgcctttcataagtctactttttgttttaaagtgtgtgcttgtgtgtgtgtgtgtgtgtgtgtgagagagagagagagagagagagagagagagagagagagagagagagagagagagagagagagagtaaaggtactcatggaagccagaggtgacagattccctgcagatgaagttgacaagcggttgtgagactccacaacccccacacacaatgtgggtgctggggattgtacttagattccaggcaacgtcagcaagcactcttcactactgagtcctctctccagctcctaaactgctatggtagaaagaactgaaataccaaaggacaaaactgtacagatacagaagagggcaaagaattgaaaccaaaagttcagcagatgacctgaagattattttgaatgtatcaagtgaccataaaatatttttaactttctcattaatgatacatttcataactttcagaagtgtggctctccactttttctgcaggacagtgatgcaggctaggtcatcctttcttgtcacatccacatcagctgccacataaaggtatattttgatagtccctcctttaaaaatgtcttcaaggcatcactgtggactggagtgccctgagcagttgcaggatgttcagctgaacttgaacctcagataagcaaagaatgcttttctcatagaagcatatcccatgatgtcattttggtttttcttttcttcttttacttcttgctaagctaataaatctagctgacagctatgcatatctatgtgcatctcaccttctactgcctcctggggatccaagaatgaccccgaatttctggcttggcgtctaccttctcagagctaggattacagatgctcagtaccacactaaatttatgcagtgccagggatcaaatcgaggtctttgtgcatgccaggcaagcactttaccacctgctacattctacagcccagaaagattaatttttgctggaggtgggtttgagattctcagagtgatgcatgtgcctccagctcccaccctcctcctaagccctccgtgctgcagcggctctgccaccatgtatcttccaagaggagacaatgccctgtctgagaagacagtggtttctcagtggaacaggcaaccttctgtggtagctcttcttacctgtcagatacatgactctgcagagtcctgtgtacacactttctacaggacaatgagccctttatgcttaagatgggaaaaatcacattgctaaaattaatgttttataagactttagaccctaaggagtcaaggagaaagcttagcctaccgaagtggaagttgctgtctttggtgatgctgagattgtaagtagatgggtcagtagatacttgtgtcaaaaatatttgcccctttaacaacattctggtcttcctaaaagttttaatgggtgccaaacattgactccactgtcatgcagacagcagtgagcctgaaaattctggagaaatgtattaaatccctttgtttgtgttggttaaagttcccatgtccaagagaagacaagaggacagaagtctctggaaactaggggatgactgcagctaggtctgggtctgagagcagacagctatggaggaagctttgcattccctcccccacctccatcctttctcagggctcagctgaagccacaggcaccagtgtgacttttggcttctctctattcaacccctccccagaaataaataatgcattaatgttattcatgtcttcatgtaaacgactacaaagggaaaaaaagccaaaatcattttcatgtctcagaaatgacagcaaactccgtatgctttggaaagaaaactctgagcctaaatggaagcactggagccgaggtagggacctggatggaacactgggaataaaccagtggaatcccaattgggagtgataaacagtaatgtggtcacagtcacttcacagatgtgctgggagaacccaagctgcttatcttcctttgtgccctgcctgttgagaccagtggatttcatttcatttcattttctttattttaagagccagggcaatctggtgctgttattgaggctgacactttgcagaagatggtgaagtgcccggggccatccgcatgcactctctgtaatctcattaggtggtcctcatgccattttctgggagaaaagaaattatgagcatggctttgagcacaggaagtgcttctcggcagcaaagccactcaccattgcatttcacccatccctctttctctggggaggactgcaggtacaccatgctctgcttcctggaagacaagcattttctagaaacaggtgaccatatgaccccagtcaaagagatacaagaggtctggttgtgtgaacacagcccatacaccacttatgaccacaagatatgtatggagacttctatgaccttgagtggtagagaatcctacatataccatgcttcttatattatggttctatgacagagtagcacttatctatctatctatctatctatctatctatctatctatctatctatctatctctatctacttatttttatatagtcaattttttccttggtcatggctgattagacacagaaagtgagaccaaaggtgataagagactgctgtagtttagaactgtagtaacgttacaattgttaagggtttactctcccagggtgcactggtattaatttttataagaacatcaaagtccttggccaaaccatgctggctgcatgccagcgcatctgatgaatgtatatcacagtcaggtggtaggaatatgacagagtaagaggacattcggtttggtgcttaggctagccctgttctggagtgttagcaatgttctgatagcttttgaaggtagaccaggcatgctttcccatttgctcacccactggagatgctgatgagaaaaggctatgtgtttgtcaaagaggagaaagcaactcatctaatttgcccagcttccactatacatgtgtctataggtactcacaccagttcatattttgttcaaatctcttctcaaagactcccagctagcaaatcaataggtttggactttgtcttggtcacggttctctatagtaagcatgcaatttgtgtaatcttgttatgaggccctgatgccatcttcctggagaaagaaagctatatgcccagctgcagagagggtataattataaaggagtttgttcattggattgatttgcacagttggaaactggacagttcaacaatggccacctgcctgttgaagacagacaactcaggcagttgctgaatctcagacactgaaaccctagaacaaggaggaccagtaatgcatccaagaccaaggctgaaagctgtctggagattcactggtgtgagtccatgttggaaggtcagagaaaagctggagtctaatgtgcacagttggcggcagcagcggaggggtgctcactcaggaagagtgggccttgcttgagctggccgacttgtttcttcctatctgactgtgaataaaagaaacatcctttccaaatttggataatcttgcaaaaatgtgcaacattgaccaggaaagtcccatgaatgcagtaaatggcatctggtggccaggccaagttagtgtctctagggcttgatggaaaggcaaacccaggttctatcatggttccagctgtggtcccaggagttttctagaagcaactcatcttaagaaggctgtctgagccctcccaggctttccttgctaacctaagttaggtcaagcttcagaggaatgttgcaaaccacagccacagagcatataattagagacaccattgctctcaacttgatttcttattaaataatgtcccttctgtaatatgtctgcccaatgactgttgtttttcatacgtatcctctaaaaatccagttaatcaagctgacctgagttttgttgatcattggaatctcattaattgtgggagaaggaaagagaagcctacatctcctggattgtaccagggatacaactggatccacggtacacacttttttttctggaggatatttaaataaaaagaaagaaagggggctgttgcaatggctcagtggataaaagtgcttgctctgcaaggatgaggacttaagtttggatccctagcacttatataaaaggtcaagcttgactgtattcccagcattggggtagaatgagcagggcttggggattactgcccaacctacctataacaatgagcttcccactcagtgaaagaccctatttcaagacaagagatggagaaagatagctaacccttttctctggactctgcatggatacacatttatatgcatatacacaccccccctataaaatgaaataaatattctaaaatgtagaagcaaagccctgaaatctgaagtacttctggtccctggcatttcagatcatggatatttaacctgtgatagatacaggacttgagatgtgactgaaggaggctgtctgtaacagaacaataggactgattgtagtgggatgccaaaatgccactatgatgaccactggccacaggcgtcttctgacttcttgaactgtggctttgattattgagaagctgaatttttacaaaacttaattcacactaaattaaattgtaactgaaatgagttacagagagatctaggtaccacgttaaatggcacaaatacaaaggacaaattgctgggacagcagcctactgtcccttccttgctggaactcagctgcatgaccttggcacagtcattttcatctgctctcatctgaaatctatcccactcatgggcctgaaggctggaggttgcggggagctgaagaccagaaagaggaaaagacaaatctctgtggcatcttcatctttgaattccatcttttctcccttactgtcaagagcctaccacctattacacagtgtgtctctggtttaagtagcatcggcaccaggccactcccaatagtggcacatcttgttttctgtatgggttgttcttctaacctctgactcactcagcactttctagaactttccccaatggcacagggctgaaattgtgtctgccctccccccacatacacacactttggagccttcacacttaggaccaagaactccatctcctgacattccacaggctgacactgcagcctgagactcttctcctggcttcttcagtctttcccctgcttagtgttccagcccctatcacgtgagaggtctggagtagtcacctactgtcctcttcctgggtcctcttggaggcaatgggtggtatgtcagaacagggtgccagaaacctgttcatgtcgctgaatgtcagtggattgagtatgtctccttagtggctgtgacctttgaataaaacttcccaatttttgcattgcaataatctgatttctcgtgggccttctccaccaacttagggtttttctaacctcacaccataaagtcaacctagtaggccatgattggtacttttttttttaatgagtggaatataatagaaagtgtcagaatttgttttgtggcttcttgttttcatatacacacattaatgtctacctttgtatacgtgcatattatgttatatgaaatgaccccatactgggtgaaaatcagtttttgtaggcattgccctaagccaaggcttcttaaccttgccaatgctgtgactctttaataaatacagttcctcatgtgtggtgaccgccaaccacagcactattttcattactacctcataactatacttttgctacttttatgaatcataatataaatatctgtgttttctgatggttttaggtaacccttgtgaaagggttttcagccaccaaaggggccgcaccctacatgttgagaactgctgccctagactaaagaaaggtacattcatggcagtacctataagatctaacacagtgtctgagccacagatctgaatacatctatgttaagaagggcaaggctggagttcgaaggttggagatcatgagaggaggtgacctgcccacgtgtcagtgaccctggccaaataggcctggttagcataaaacattacaatcccaggtataaatgatacgttggtggcattcattgtgatgggctgtggctgtggctgggccgagtggtatttaaaatgaatgtttagggtgaagtcaaagtcagacgtgaggcaggtttggcaccagagatgccttgacaatgagaaatgctgtgattggcgttttgggactcagggtcagccagtctcttatgaccattccttgccttgaagtctcacccccacctcttccctccagtcacttcactgccatggtaactctgtttgcatttccccagcacccctctaccgccgtgccgatcctgagcgacccactaagggacatagcttatttcttcaatctcagtctctgccaattcccaagccaggtgtcactcttcccccagatcagcgtctctttgacccgccttcctgtactgcaatggccttgtgcccatcccatactctggtctcctgtcagctgagggatactcctccctaggatcttagcatatggcagtgaggaggcaaacaggaaggattcagttcaggagactgccaaggtttctcagggtggtctcattagtcatccagaagcaggagctgccatggggttgagccagggccagggaatcctgtagcaatgttttgttaagcttgtggcctttacttttggcagaacactttttggcaccttcccttagataaatcagactatataagggtcaagaaaggtaagaaggggctcctcctgggacaagcacaggcacctagttctttgatgattacagataaacaaatggacatgaagatcagtctggagttcctaaaagctttgcaaggcattacagtgttggacttgtattctttgctgttcctgaagctattctgtgcgcagtccaaagtgatgggtcaacctttatcagcagcacagggatgctgggacttggcacagttttctgcctctttggatgtgtatttatgtctgtcttctgcattcccggaaaaaggtgggaactgcagtttcccgagtgccagctttgtgccagggatagtccctaaaacatgacatggcttggcttctgcaattctcttaagtcaacttgtcaagtccttttcatcctccaggtggaatggacaatgatactgggagtcagtttcgagaacagcataagggctaggggctagcattagaaggacagaagctgccaaaggcgcggtcatcattaatatcccactctgccgggaaggaaactgagctctgtatttttttaacatcttttttgggtgatggagtctgaattgaaatcacagtctgactctgaagtcaacattcttaaccattgttgattctttcagcaaatatttgactaccttttgtagatcatacacggtttatgtcaacagagcaagcaaaagtcagcccttaaaggagaacctggcaggattgggtaggtaggacaggagcaatgcattagtgagaaatagtgtgttagatgctaagtgctccgaggtaatcaaatggaaagagtaatagaggatattgagagttaacatatgtattagcgttggcaaaggtcttaatacagaagaggtgacccatgatatgtcctataaatttaaagagtaaaaaaaaaagccttggttcaaataaaaggtatagttaagccagaaattattagattataatgattaaattagataagtggtaaacatgatcttgaaaataagtggatagaacttgtgggttgtagcaaactgttaatatgatctgagacacactaaaaatagattatgacagagacagtgatatacagagttggtgacatggctcagtgggtaaaggtacttgctgctaagttcaaggacctgagtctgatccctggaacccacatgtggaagacatgcacacatgtgcatacaatccccacaccccaatacataccaaaatagataaattaaataaaataagtgcatgtaataaaggagtttagtggattctctctgggctggggcacagtttatccagtgactttcttccagtgcaagtatgagggcctgagtcttaccctcggaagccacataaaaatgctgagtaggacagagcatgcttggaatcttagagccaaaaaagcagtaacctgtggattgatgggcttactggcaaattagctccacctaccaggcaagtaagatgccatgtctcttgagtaataacacctgaggctaggactctcaaccccacatgtgtgtgctcacatgtacccatgcacacacaagaatgcacacacacaaacaatcaagcataagcaaatacaggattcctggcactgacatctttgcccagggactggaaactcttgtctttgtgtgcaagctcacgtgtggacacatgctcaggatctctgcaggtgttccaatgtagggtgttcaccacatcagaggcaatcacccaaagtgtgctcattgcagcgtgactgcaggctttaattagcaaggatttccttgcacgttcagaggaacattgatgcattctgttccttcacaacttgcttggtagctgttcattctattgcaaatccaaatgagatctgataaatttagctctgattaaaaactgaatccttgggctgtaagatgaggcacaattgcttagcacaactgttttctcttcttcataggaaaatgactttctaggaaagtgtaaaacatataatttgatccaaacttcttaattgtccatgaattcacacgggtattcattctctagaaaaaatctggattttttttttaggccatctggcattgtctgcatgtcacacatagtgaaatcatgatagcagaccagggagtcatcattgaaacagaagtatgatgggcgaagtacttcggtgtatgtttatcttattgattgtttaataaagttctacttggccaatgaaacggcaagttaggcaggactaggagtcaaagaggattctgggaaatgtagtagagaagtgatgatccagacaggaagtgacatagcaaggagactctcatttaagcgaaggagaaacaggaagggtcctcttttcccctctgctcctgctccagtggcacaatgtgatccaccggcaaagagggatgccaataaggcgtccgataagataagtcttataaaatatatagatttatgatagttaagactgagctaacagatgagaatcctagtcattggcaagcagcattgtacctaatacaagtttctgtgtattcatttgggcgggcagctggtgtaaagctcacacgtggcggtggggctcaggcagcttttggcagaaagatttatcgtaacagaagtaagacctgaatttgtgcctggctggaaagtaagagtttttatgagcaaaagaggttagcagccaaaaattagccccctgtctgtgaggcttggaggcaaaacagatcatcccacacagtcaagttcaataaagctactattgaacaactaccctgtgccaggtctaggacaaggtgctagactcacagtgatggcagggtaattgtagggtggttgagtgtgttcaccaaagtgtcaatttccacgggccaacaagaatgctgtaatatccaccactaggataatttctttgtactggaacacattcttacaacagtcactttaaatacaaatgcattgtttggaaaagagtaaaataccatcactcatgctgctactgtttagacatccaacaaaatgggtgattcatttatttcggacatatctgttgagtacctaccacataccaggcatcatttgaataaaacagacatccatttatttattctcaaaatagttatcttttgttgaaaggagagaatgtgtcagatggtgtaaaagaaaccatgctctagggaggggaaggtataggaaggtggctgatgcctattaggcagggttatcaggagctttttaacaaggtgaaactccagtgacgattgaaagggaatgaagaaaagccatagcagccatctgattagaatgcccagggagcatggaggctccgaggcagaagctcttgatgtgatgatggtatgtggcagcaatgaagttgctggggcgacaggcaatagcagtggagaggtgagggtagcagcaggaaagccaagtaggaaatatcctgggagatgtgaacagggagttgggcttttgtgtagccaggggctggtaaatgaggatgctgaaggaaagtctacttattctgcatctgtgcttttctgcccagggtatttgctgatgtttttcttgccttcttttccctgcatcagctgcttagtaaactaaccagaccagatggacagttggaagatgtggtttccagccctggctctgccatttgcaaacatgtacattgtgagccttgcctcattttatgggtgaatgattccatagccagagaggtgggttaagcttgctagagcacaagcacactcagtctgtgtgcaatgtagtctttatgcatcacatcagttttgttctcattttctgtattgacatctttgatactcaatggactctataattaagtacttttgaaggtgaagcttcacaagaaattcaaggatttgtgaattaggcatgtgaattatctttgctcactcaaaacaagttctcagatcagtgatgttttacttactggagaactgatggggaatgttcttctgtgtatatgtttctcttattggttaatgaacaaaacaaccattcgctgattggccagataggaagagacatagctgggcagaatctggatataagcagggacaaacaagaaatagctctcttgtctgcagagatactgagcagtcatcatgtagcaggcaaaggaattgcaggtctggaattcccggtaagccaagacatggaaatacatagattagtagttatgggttaataattaagacagagctagccaataagaagccacagtcattggccaacagtatcataattaatatagcttctttgtgttcatttgggactgaagcggtggcgggacctagcagggccaagaatcacacgttacagagaaccaactgggatcttgtttaaaagtagacttctggagaatacttgcaaattcaggattctgtaaatttggaatgaggcacagactgctagaatttgaatgagaaccccagaagactctgaaacagatggtgacagtccatcttacaaacactggtatgctcagtgttacagctattgctgtcattggatgctgggaaagtttagggtgtcagtggcatgaaaatagtagtggagatgctaatggtggcagtgacggtggtaatagcagaggtatagatattgctggtgatgctggtgataagggagagaggcacagtgatgtcagagatggtgaaagagacagtgtggtgatagagacattggtggtgatggtgatggtgatggtgatagagacattggtggtgatggtgatggtgatagagacattggtggtgatggtgatagagacagtggtggtgatggtgatagagacattggtggtggtggtgatggtgatgatagagacattggtggtgatggtgatgatgatagagacagtgatggtgatggtgatatgaggctagtggtagtactaggagcgaatgtgttagatggagtctgaagatgcagctgtggtggtatggtagtcatggtgatgacgatgatgatgagagtagcagagcatctataggtgcaaggatatagctgtcattgcttagtttccctggctgtttattgcacaaatgcggccgagcttacaatatccactggagttcagcttctgcgtctgtataatcaaggacacctgtggctgcacttctttctacagcgtatctccctaggtctgacctcagagtcatcctcccaaatggccattggtgccattacatccagctcactggcccctgcttgtctatcatacattatgtgcgagtttctcattaagtacaaaacacagcctgatgaattagacactggccttatgcttgattgataagtggattcttagtttcgggggagctgttgggagctggtggaaacgtaggaggtgagtctcagttgcatggaggagtacttgggggcccttctactttccctgctggctcaccatgaggtgagatggggaggttcgctctgccatggtctccccacactatggtattctgccaccccagagacccacagtgatgaagcaaggcaaccatgcaagcttcagcacaaactctgaaactgtgtattaaaatacactactcacagtcacagaaggccagcacatcagtgtagttcagattcttagaagcactcgttatttcaatgaacaaagcatacccccccccctcggggtttgatgctaacacatgacaaaacattcctggatgactcaaggagcatttgactttgtgtgtattgttcaccaaagtcacagatgaagaaggtttgcaagacagcaggaagaagcttgttctgaaggccgtctcagcacagatattaaaaaaaggtttggacattgtcctgtgaaggcagaaccatcaaaaggaacactgccttcccagcctgggagaaagtgacagcggtggctcccttgccttctccctatcactttccacccttctctaagatgacagccatgattcccaacgaggctggcagtctcaaattcgtcggactcctgagaggacaggcttagacttcagtttgctgtgagaggagctgtctcttctagaggatgaggaggaggaggaagaggatggcgtgtgtgtgtgtgtgtgtgtgtgtgtgtgtgtgtgtgtgtgtgtgtgtgtgtgcgcgcgcgcgcgtgcacgcacattagatgataaggaacattcctggaataaagcaatgttttgatttgtttgcttgcttttactactgcaagtgtcttcatacattctccctgagttctgtcatctttgtccctacttttctacctctatatggctccaattttaccttaagtaaggggaaatctgatgaagagtgaaatgaaatagcttcctgccttgccagttaggatgaaagagaggcccatagatgcctctcttacattgttcctagggccaggccacaggcagcaggctcaactgtgtggtcacctcactgacatgcattaatggttttggttttgcagtagcaagactgtctgggtccttgggcctcttccttccttcctcagtctcttaggcttggaatttacaaaacaaacaataaatgtagctcccctgcaggagcaagggcagaacaattagacctttattaggaaggggaacccttaagagaattatacttcaatattcaagccctggctccattctcctttcctataagaaagacattgatgaacagctgaggcacgaaggacctcagccacccaagagactcagctctggcttggctcctggcccagctaactgctggtgcctcgtagcctggctgtgggctgatggaacatattgcagaaacatctcagtggatccagtgcttttgtctgagaacctttgaggagaatgtagcctcaatttaatacatagctattatcttcctgcaggggtgacattttgagggtcttcatactgctaacagttcaccaatcacagtgatttccctgggactcagcaagatgtgacggtgaggggctgaggctgagggggtcttttgcttagtgttgtacatactcagctgggatccaatcggcaagggtgttgtgacatctatgaatagcataagagctttctcttctgggaaagcagaaagaatgggctgaagaagcctcttgttgtgttatggatggggacagaatgccatgccattttaagcaaacattcattgtgaatctgcccttctctagcctcgacataggtgacagggtaaaacatgaaccaaagaaagccgctgccctcagggacatccctcgtcagcaggaaagacagaaatgcacctaagcattatagtttacttgccatgatggatctagacatcagatggttctctgtgtagtagtgatctagagaagatagcctctcctagctttctccaaagtctgctttccctctagagcctcaagcaaatgttcttcctgacttcccatcagaaggtccaggccccaattttaaccggggagccagtagacacctggggcttcaggaattggaggactgttaacatttttcctttggattccaaagtagatagccgaaaaggagcaggtgtgattcactcactttgtagatcaccaagtgtttcacatagcacggtggtaggtctggatcttgaagaatcagaaagagcttcatataagttggatatctgtctgggaagcctggatcccattctccacagtggcagccctacaatgccactttgtcctcagacagtccttagcctgggcttctcaggacatgtaatgttttccctaccccgagcatcatgctattctttaatttaactgcaatcacttcttgactgctgctataggggtggaggccacacgagggtatatgtgtctctgtgtctgtgtgtacccaagtgtgcacccacacccgtgtgagtacaaataagtgtgtgtgaatgatgtactgtgcattgcaaaatgcaggcaaacaaatggatgatccggtttctgtgaaacaagccaataaaaggaaaaaaaaaaagagcttcaataaaagtcttgctgtgctcctaaataacagagtaactaccagctcaaaactcttagagctacacagaatatttccagagcccagagttgtccagtccctgaaataaatcatatagcctcaaaaacttgcacactaaaaatgtgatttcagtcagtcattcctaatatgtgctttaccttgagcaactcataaataagccatatagtttataagaaagggaggattgggccatctttctctgttctccttttttccagtagtcttggtggtgaagaggacaagggctgagaaaggccatttgcagcgtctcatattgaatgtctatctggttcaaatgcctctttaacaattcttgggaatgggtgcgtatggtgtgcataggagtccagtgtgagcatgtggtgtgtatgggtgtccagtgtgcacatgctatagcatatgtatgaaggccagagtacaaactcagggggtgcctatgggaatccagtgtgtgccttctattgcatatgtatgaaggtcagggcacaaactcaggtattggttctcatcttccactttgttcaagagagagtctgttgtttgtcagtgtgtacaacaacagcctagctagctggcaagttctgctgagtcacctgtttgctcttctcttctcactgggataacagtcagtgccggatccacagctgttctgataatccaaaaccagtttcacgcttggcagcaagcacttttatctactatgacacctccttagccccttcaaagcttctaacccacgtgacctgtgcctgctctacctcctagtctgagcaggctcaggtctctgttctgaggattctggctaccacccagggttccgatagcactgttaatttcaataatctgtcttctgatgatcaaagaaggtgactcaagaggaagagagcattgtggatatctttgtttcagagtggcattctctctgctcctttctcaagagagtggggatcaaagagattaatattgctcaagttaacaatatccctggagctccctccacaaaggcaaagaccttggactcaggcgtatcagacagcccagacttgaatgaaactctttgtaccttgccagacagtgacctagcaactaagatgcccagcctgggtcttagttttgcgtctgaggatatataaacctaccacaggcaatagttttaaaaatatcagaaaatggatttgccacaagtaccagatatagtaaatatttaataaccaatatcagtgcaacactttaaggaatgtagaataatcaatctatgtttttcttttggttgaggagagatagtattcatagcagcaagttaattattattttttaggaaacaaaacctttagtttactttaaatgttagtgcttttgatgaaaaaaatagtatcattgaaaatattaattgaaaatatttcagggataaaatgaaaaattaaatggtggtggtatgagcagggagggatgctgggagatagagaaaatgttagctagatatggagaaaatattagctgtgtgattcctgtggtctgtgggcatctgaatattgtcactcctgcctcctgccgttcagatatccatcaggtcattaggcatcatttgcaatacttaattacattcgagataatgtcaagccttgaaagcagccaagcagctgttggctgtgcttaagagatatggagagctgaaccttggagagaactacaggcatggagaggaagtgaaagtacatgacccatcctgtcaaaggcgagaaaaagctcagaagtgcactgcagacagctgcataactgggcacaatggaagaatgggtgggtgggttaggcagggggggcccagaaagccaaacagagtttcatgagggaagaggtgactgacattgtcaagcctcctagaggtcaggtaggatgcaggctgtaaacatctaactccatctggaacaagaatgacctttggtattgcaagcgtgaggtcttcctggaggtcagccgggaaaggtgctggccatatttgaagggttcacgtcttcagagttgtagataagcagtgggtcatgtacttaccatgtgtccagtgttgagttccatccctagaacacacaaaacacatcatcattcaacctagcacttctgcttctagaaattaatttaaaaaaaaacataacctttatttatttatttatttatttatttatttatttatttattggtttttggagacaaaaaagtctgtgtagctttggagcctatcctggcactcgctgtggagaccaggctggcctcgaactcacagagatccgcctgcctctgcctcccaagtgcttgggattaaaggcgtgcgccaccaacgtccggcccaggataaactttttttttttttaagatttatttatttattatgtgtacagtgttctgcctgcatgttgcctgcaggccagaagagggcaccagatctcattacagatggttgtgagccaccatgtggttgctgggaattgaactcaggacctttggaagaacaagcagtgctcttaacctctgagccatctctccagccccaccaggataaacttttatttagaaaagtaaacataggtgccatgaagaaaaataaaaatcagtaacaggttcctgacagagaattacagtaactatcttacatggacagcaagaagaaataaacaaacgatggatatccgtatggtcaaatgacatacagtcttaaaattgtgttttaagtaaactttcaaaaataaaattcatacagagaaatgcacaaatcataaacatgttgttctatgaacttttatacagggacaatgttcataatcaccatccagagtgagaattagaacatagcctagaagtttgtttccggaggaccccagattctgacacctctctccaaaggacctactgccatgctatctgttatttagaattaggttagtatagtttattactacatatattgaattgccatgtatatatttgatcacatataatccccaaacaaacaacaaaagcaagaaaaataaaaagaaagaaaaatcttttgaacaggtccattcaaccatcggcaagtttcacccccaaccccactatcccaacaaccctatccccccctggccaaatatcagtcaaaatcttgtttaggagcaaatatttcttcaatgtgtttttcttgctccaagatgttcactgctgtgctccatatagcacagaccccaccctatcttccttgggggttcctggggcccagagatatgggtgccaatggggtcagggggcaatgattccttgttagggaaatgggtacttcttccttctgcagctgaacccctggcccaatgttgctgtgttgctattggttgctgggagactgtgacgtccacccaaagagtgatatgggaaggacacagcatagaggaaagtctggtaaccatctataaagagtggtccagaaggtgtatgtatacatggtattcaggccaggatccgtcagtgggtatggtggagggttggtgagggttggaagaaaggagggtcttatattggaattggctacccctctagctaggccttctagtgatccttaacatctggaggttctaaataaaggtacagctggctggctttggaattttgcatttcagctggcccatactcgggacactgcatgatgggtgagggtgaggtaataaggatgtttgggaaggatgattgttgaggtcccaagctcactgctttccttatagagagactagaatcccatgggtctggggaaacactgactactgaccctggaagccttgtagaaggaatgtctccagtgattgtaggctgtagtgagagaatactgagccagagcacagacatgctggcctccgagggcttctcctcctaaaggctttgcttaatgccaactctaggaatgtctcttggcttgtcagacttctgggggcatcccggaagctatgtgggactgtcgctgcaaactgaagttgagacacaaactctccctgcttgaaagggctgtgtttaatcttgtgagcaggggataccagggaatattgcaaaagagaatggagtggtgttgtctttcccagtggctatcctgggcagagtttctcctcacagaaattcctgcaggacatagaagatgtgaataggaatgatggaatcatctggggacacaggtgcagtgtgtgtgtgtgtgtgtgtgtgtgtgtgtgtgtgtgtgtgtgtgtgtgtgtgtgtgtgtgctggaagatgagtggggatcagactggcttcttcagcaagtttgatatgagctgtgggagtcaaatgaaacggaagactccttaattattctttattgggtcatgctagtaccttgatctcttgtctgggatgcaaattttcagtttccctcctggaaattcacaacctcctctggggtggataagtacatcagagcaagtaactagagcttgctctctgctcttttccgttttccagggaaaaagaaatgtgacagcaatatctaaagtgtgtcaactttttgcaacagcccaatgtcctagaagcaatgaacccactgaactatctctcatgaaattattacctagtagaacaatacctggaagcttgcttattctggtgctatctgcttttgttttcctgagttgtactggttccagtagcacagaactgcttcctttcctcttcatgcccgacgtgagtttggcggatgtggtaaatagtgctacagtggtaaggcactaggtttctgtgccagagagcatgagttcaaacccaagcacaagtattcattcaatcagaatgatttttacatttccacattgggctgggctgggtgggctgtgtttggggaggggactaagcagtgctcattaccagtggttattgttaagtcatcaaacaaagctttatgcttgccactcaattggaaaaaccacaaggggtgttcaccttagattagcagctgcaagctttccattctatatacatcttatcatctgattctcagagctccgtgacgttgtcagggagattctagtaccacattttcataaagaagtggcagggtaattttagaagtctcgatgatatctaattcttcttactaattttacagtcatcaaagagaatttcagtattaccccttccatcaccctggtgtcgtttcccatcccttgactaaaattgggctttggaaagcacagttaggcacctggactctcatggagccaaatcaaacggatgtgtttctgtttgtgtctttcttctccttacacagccagacggtcatttattttttttttaatagtcatttctcttggctttgattcactacactcttcccacattctgtttctcctccacctttttatgaggaggcctcttctttgacctctgagtgctgggtcccctaggctcaagcctacatccttgtggtacccaacgcctctaggctcagtactggaaagccacccataggataatgattctcacactgaagtcacattcccagcttctgtccaaagctccagattcctgtgtataacatttggatgttcaatagacaagtcaggcttactgtttctaaaacaaatagttaattctgccccatgggaacctgaattctctcttccttctaggtttttatccacctaagtgaatgccatctcattcgtgaaatttgaaacgccccaaatgtaaaaataagcaaatgagcaaacaagtgaagtcatgcttttcctcccactttttgatcacctctttcacttgatcctttgcctgactcccctcaatctctgttaccctccaacaatcttcctcctctttattgatcttactcattgcagttcgggattgttttgtgtcatctgatcatggtttctgatgcaggaggccttaaacatgtgtggaagtcctgtgtgtcctcacctcttctgaagcagatcattgcctggaagagtaatatatttgactgtgtgtaatgtatttgacggtctgactttgacaagacagatatcaacagatacaataatactgttgttaaactttaaaatggtcaattcttcctataaattttccttttgtttctgctaacaaaacaaaacgaatgaacaaacaaaatacagagcaaggagccaagaaagttggcaaaccacgtaaaaagttttaaatccatagtcattagctattataatgctcatattatcaatttcatagtgacttagtaaagtcgggcagttagttgttggttcaaccaagaaagcaaccaggctttctggcttggagaccagagccatgattcagagacccactgacctgcagaagaggcatgtgtcattggagtggatctgaacacagtgtgctgccctgttgtccccttttaaataactattgattcctagaatacattcttggaggaagaataactttacatgttaaacaccatacatgtgctaatgaatttggtcttgtagtagattaaaattcaaggcagggaattttcaggttcattacatgctttagggacatgtgaaagtttcagaaacacatgatggctccttttggaatttctggaaatataggcattgctgactttgagttttacatggaccgtacatgctttattgagagaagtaagacaaaaaatggatggttgattaatgcattttaatttaccatgcatttataccagaattttattcaagggtcagattttaggaaacttgactctatattttttaaagtgaatgattctatatcagaattcagatataaaatttaaagatatctgttatctctggtcttttcaacatgagctgctaaagagggaaggagtcttaaaagcttttttttttattggaaaaatttcaagagactattgattgggtctcacttttatgcatcaggatcattactttcaggccatcaggatagaaataagcgagggcaccagcagggttttcatcttgctaaatgtggacacatagaaaattatgttacttaaaatcatgctgactgcacacagacaggtttatggccaaactgcttcacgtccagctgacaacaggacattagaacaccagtcaccaggaatctttagccatctatcacttatatggagagtctggatggcttgctgatggtgaggttcaggaaggaatggaagagacaggcaaggtgcttaaaccagagtagtcaaacagtcgacaggaggcttggccacctgctatgtcaacatggaaaagctcctgttttctggatgatgcacattttagcacaagtatcatcttttccaagaaaagttttcacttctttgctaattagatccgttgaggaacttggtcacacctcttcaggttaattatcacactaccctggacgacttctttccttttccaactctcctactgagagcaaatatcaatggttgttttccactgtgacctcagcattgcaccagatagatctgattatatctgtggatgacttaaattcacagacaagactcatagatgtatatgtatgtccacacattaataacttacatatcaacaacacttaatactgacagtgaagttggctgagtggccaggagcaagacaaactttgggagttcctgcgaagctggcaggagtaagggctgagtgggaggaaaatgggcatgggaagaggagcctttgctggggccctgagtgaagggaaaatgacagggctttggcaagcagcaagaaactgggccagagactgaatgggggatagtagtgacctcaagactcattcctgattgtgcctctgctggtttttttaacttggagttgtgacttttactctaaacttctttctttttaaatgcaaattttaatgtttatttatctgtgcacatgtatgtgtgtgggcatgcatgtgctaaggagggtatgtggaggccagtggacaactaagaggagtcaactctcattttccatcatgtgggtctcaagattgaactcaagattgtcatcagacttggcagcaagcaccctcacccaccgaggtttattgatggctccttttttctcattccctgctctgttttatccacacaaacattacagacaacctctgagctctcccagaagattttcccttcatcaccaaccaccacactgtgtatgtgtgtgttgtttgtgatatgtatatgtgtattgtttgtctatgtgatatgttatttgtatgtgtggtacaagtggtaggtctgttgtttgtgagtgtgtgatatgtgtttgatatccatgtttgtgttgtttgtgtgtgtgatatatctgtattatgtgtggaatgtgtgtgttttatttgtgtgtgatgaatgtgatatgtatgtactgtttatgatgtgtgttgtttattttgtgatttgggtatgtattttgtgtgtatgtgcttgtgtgtataatatgatatgtatgttcatgtgtgtgtaatgtatctgtgttatatgtgtgacatgtgtgtgtgtgcatgatttgtgtgtgatatgtatatgcacatgtatgttgtttgtgtgtgataggtgtgcaagcgtgtatatgtacatgtgtgtgtgttgtgcttgcaatgttttttgcctgaaagagggttttgttcatctcatcacttcatcagcttcatctcattttgaaacaactaaaacatattctccatctgtactacttcagttttctttgttctatcactccctttcagtaattgtattgctcagaaaagataaaattatagcacaggggaaaatgctaggaaataaaatttaattattgttgcttccattttatagagcagagagagaagacatctcaaaaaaatgactaagatgatgtctactaataaataaatgccattctgaaggattcaaacaaaggcagcacaccttttacacacctgacaggtacctggctcaccagaagtgggtgggaaatgaagtgttgtcgagggactcagttctgaatgaaaaacatcattgtgtacagtcctgggacagctggagaggctggcggatggatgccatgggatgtctgtgtggaagatttaggctggttcccactctctgggtcaagacaaactggcctctttgggggcccgagtcagtggaatacccaataaggaatgaggcagttagtggctagggttatactatagaatatattaattggcacagctttttattcattttcctttttctgctgcctaagcttaatctagtaagtcaggtgagttatgcaaaaacatgagttgccatgttctgactctccttttcaagcagcgagctgagatgaaagtctgaatatgttgcatgtgtgttcctgtgtcatatccaggggcctggaagggaagatctgagggtaagttgaagtcacctctgctttgtaaagcttttagtgaatactgtcagacacatttggggaggaggagaaaatccccggttgggccctgccttcactggaaactgtcatcttgggtagtcactgggcttggcttcttcagtttcttcctcacacttcctggctgccatcatggagtaagcataacatcccacaaggctttagaaatcagacttaggacaggccaggtggagctggcactaggattacatctactcagcaaccaattatttaaggtcagttgaggtaacactagcttctgtctgagagccaacacatcctgccaattaggctcaaaagcagtaagtacattttttccttccaaaagtgatagctcatttattaatgcattgatttgagccaaaatgtaaataattctgaattatgcatggcttgaggtaaaggaaacttttctattttaaaatctccatccattcagtaacatcttcctttaactgttgtgttcagtgttcatcctttggccatgaattcatcttactttgttcttctatttttatttttttaaaaataaacagagcagagacagccttccatcagggggatcccccccacttgaggcacttggtaggtgtgtcaggcagttgaacaccttcgttctgttttttaatccattaaccttgaccttcatcttggcttctcatacaggaacctatgtatgttcacatcaggcatcactaggttctgcagaacaatgtcagtatttgcttggcttatttatggtgggtggaccatttccaagggtgtgttaataccatggtctaccaagcacaaattaataagcaatgcagcaccaagattcacctagaagtattccttgctgctggcctcctgagtttgacattttactctgtggtggggacacatccagatggcagcttctgaggtaccaagtctggcccttgaatcagccctgttgtgcacccataaaaggcttgacaccaggacctctatgtcagaggcttgagcaagagcactcagcagctgttggctgaagcttgcagaggtctgaccttctggggcacatagaagggcaaggagagaattagacttttggtaactctagggacaaaaaagaaagaaaaaagcttgcttcagacctgggggaagatcttgcagttattttaaggggtacaaacacagccagagagtccactagaaaaaactggcctgttgatgtaactcccaaagtaactttagctctcattttccctttaccaagattagaggacatcctggcttgcatttgaaaagagaaacactttagctactactagaggaagaaacttcacacacaggctgatgcaggtgaacacggtctatcagccttctcatggatacagagaatggattatgagtagctttgtgctctggggcctccagtgcctgtggacatcagaaaagctgagagtcacaaaaggagatgatggcatcaggtagccaagggacaacctcagggagatctgctgtggaataattcttctgtacactgtaaatatatgttactctcattggttcataaagaaccgactggctggtagccagacaggaagtgtaggagggacagccaaactgagaatgctgggaggaagaaggtggagtcagtggagttgccaggagacacaaagggagcaagacatgctggaggacaggtaaagcccccagccacaaggcaacacatagactaatagaaattggttcatttaagttgtaagagctggttaataataagcctgtgctatcggccaagcatttacaattaatattaagtttctgagtggttattctagactggaggtggggacagaaaactccgcctacagaggtcagcttagagttatgttggcaaagctctcccacagacctagtctctgaactgaggttataagagagagtcaagaagaagagggtagaacagagaggaggctttacatatgaagggagacagcctagactcccagcaagcctaagcccctccctcaccccttggcctccagaggtagaacacaaggagagaggatgctatcataaaagtgtattaagatatcttaaggacacggatgaggtgcaatgtcttcagtcttgtgactttaatactccttacaaacaagtatttctgcagtttgggacaccaacaacaccacagacactgctagacaagtctggggttttgaggtaatttaggagaaatttcaaggctatcaagtatgtctgggtttggtgacagtgtggagaaaaatggaacttcacatggtgatgggagatgagtgcttaaattccagttctggcattttctagataggaagactcttctctgcaaaaataaataaagcttaagaaaaaagaaggttagccgggcagtggtggcatatgcctttaatactagcacttgagaggcagagacagcggatctctgttgagtttgaggccggcctgatctacagagagagttcaaaataaagaaggcagagaaagtcaaatggagttctgaggaagagagagcagggttataggaaaaagagagaggaaaaaagagaggttgggaagatggttcagtgaactacataactacattctgggcaggaatgaaactggagtgtgagggcatgagatgctcacacctgtaaccttcatactggtagggaaaagaagtaagatacggtggtaagatggactgagaaagagactgaggtctgaagctggggagtgagagacaaacccaggaagtctagaagtagtccaaagaatcaagagatggttagagaaaatggaaagaaaatggaagatccgagtaatctagaagcctgcgagaagccaggtgtggtggtgggcacctgtgatcccatcactttggaggccgagttttattccaatctgggctacagtggcaagtttgtgtccagaagccataccctgtctgaagtaaatggatgggagttaggcatgatggtgcttgtctgcaatcccagcacttggatgatggagactgaatgatgtcatccttacctgtgttgagagttcaaggtcagcctgggctatgtgagacccctatgtcaaacaaaagcaaatggaatgaatgaacgcttgggagaatagagcccttggtaggcatgggatgctgatgttgggtctggtatgtgtaggcagttggttgcctagaaggagctctctccttttcactgtccctatatatctctgaggatcactggctccatgttctagtagctttccaaagccttgtctggttcccttctgcaataggagttcttgatgcagtcttgtcatcactcagcttcagtatttactcagaagtgatgtgctctgcccggtgtctgctgagtctatgggaatcaaccctgccacttcacaatgtagttccaatagttcctaggactggactgagtctccccacccccactccacccctgtgactgcataaagcaaacctctggactctgagacagaaggctggagttggttgaattgctaatgccatcaggagatgatttgtggccttttggatactccccccacacacacaccacagattggatgccactgtgtgtttgatgttttccaagtgttggaatatcttactgtggggagaaaagcatttgaatttgagtattagtttctccttggcttctttgccagtgttttgatatctgatggttattgccctcattttatacatgaagaaaattacttcaaataagtttattagctcatgaaaaaatcaccttgataaagaagggggtaaattaactgtcttcattttgtcttgatttttgattgtttaacacatcagtaaactcatcaccacaaaatggcaaaacatttgaacacactgtttttttgtagaagaaaagcatgtaactcattattaccagcatcagttcacacataagacttattactaagtcttaatttgagataccatttagatattaccaaagtgcacacattccatcatcaacccctgggctctaatgagtcatctatccatcctttagagtcactgctctcatttcctgagtcttctctactggtcagaaaaccatagaattgctaataaaaaggtgacatgtggtggccaggtttgttcctcccttcctccagcctgtagttattcaccaggtatctacagaaccacacaccttggtctgcatgacattgtttcttccaactcactgaccacccccatttccaatgtcagatctcaagttctctatgtccagatctcagaacgttgtaaacaagctcctaaacttttattcactcttacataagagcaaaagtcttacaattctgttgggtccaggattcctcctctttcaaagaagtgcattgggttgccttcacaacaattgtgggtcacatgctacctgtgagggttggacacctctttaaactgtaagtcaaagatcctttctgtccttaggagtcgaagttttctggctaagatgtcatcaaccatcaattgctctgaaatcttgcattagcttctctgaattataaatattttctctgaaaatatttattgacaagcagggaaactatatgatgttcttcatttagcattcttgactagtttaatgcattcttaggtttggaacagagttaattaatgtgtttcttgttacaacaatgcattcaaattcatcatccatgttcttgtttacaactgatgtgacattttatacttataaattggcattgcaattatttgaatacatagaattatagcagctgctaactggaaaagtttgtggcaggaaaatgcttaataaagtaagaccaatcacaagaggtacatgctttggctctgattcagggtctgtagagtagcagtgggtgtgttcattctagatgttattagttttgttcacagaaagaaatctcaagtctaggaagcataactaaaaatatttttgttgttttttggagacagggtttctctgtgtagctttggagcctatcctggcactcgctctggagaccaggctgtcctcgaactcacagagatccacctgcctctgcctcccgagtgctgggattaaaggcatgtgccaccaacgcctggcaaaataaatttttactgggggtttccttcaaggtaccacatcgtgggcatgcaaatatttattaaatcagtaggttagggacttggagcattccattccagtaaacatataattattcatttatatagtatgagtttcagtgtgacctgagattcaggtcttgcaagaccatgataattcaggatgaagtcggagggctcctgatgcttccactggacttgtggaaactggagggctttttgtttgtggtttgtttgttttttttccagctcattgggagaacaattagatgagtacaattagatgctaccattcccccttgttttagcactgaaatccctgcacccagggggaaccgtttatctcacacacactgggactggtgagtcactggagttgagtgtttgggcataaaagatgtcatgaagagttataagcttgtgctgaatgagctcatatttcccagtcagtccagcacaatgacacttgccttgtaaataccttccgtttcctctccccacaattgtatttacttggcaaaactccaaacttggatgagtgcaacacttgtgccccagcccttagagctcgttggagacaatcacataaactttattgttcttgctggaaaccataaatgggtattgatattccattctagtctcccataactttacttcctcaccctctcatactcctgacttgccttccaatatcctatatccattctcagccatcgtcaactgatggctaataattcattttaaaaaatagatgctgccatgggtcgataactttgtcctctcactgccaaacccaatagcctacctggctctaggtctctgccttcactcccactgcaacacacgaggcattttgctcctatgagaggttggtccttatttttttttgtactgccgttctgtccttcttttcctctggcagtttcagaagattctctattgatttattgttttttttttctttttgctctctcatttacagcagcattcaagttctaatagccatagaaaccctaagcttcttcaagccattatgcctgttagcaatagccatcctctctttgcttttaggggagaaaaaaagaactaactacaaagtgtgtgtgtgtgtgtgtgtgtgtgtgtgtatgtgtgtgtgtgtgtacaggcgggttggtggagcccagagactgatattggtgtcttctctcattctccacttcattttctgagacagtacccatggagtacccataacaccattatggttagcctggctgaccggcaagcccccatgagctgcctgtcttcacccactcagaactggttttatagacatgaactactatactactatatcctgtttgacatggatgctggtgacccaaacacagatcttcaggtttacataacaagtacattaccactaagccatctctcagccctgactaactacatagcttttcttttctcttattttcttttcatctcattcctttggaacaagtctccaggtatctctgaaacagttcaaaaatgatggggaaatattagcaaaacttagcaacatccttaaattttttcagatgccacagtttgtcttgttttttcttttctctctcctttcccctctctctctttctttcttcatttcttgaactattcagtggcatttaaggcaaattatctcctaccatcttgaaataattgtttttctggagagttcttggagatgttttgatatttcttcctgccttggtttctgttattgtcctttgggagatgactggtccaggctcctcttcttccttgtctacactttgtctatatatgattacatctgtagctttgagtccctgccttctggccatgctttctagttaaactcccaaagggattttccattggatttcaaatacacacctcaaaactggcaggaagaaagaaagaaagaaagaaagaaagaaagaaagaaagaaaggaagaaagaaaggaaggggaaggaagatatcttaacatcttaatgcttgcctacattttagatcctttgtgtgtgtgttgtgttgtgtgtgtgtgtgtgtgtgtgtgtgtgtgtgtgtgtgtgtgtgtgtaggtcagaggacaacttaagagagtcagttctctctttccactttatgggtgctggggatcaaactcagcttgctaggcttggcagtagatgtcttcaacttctggaccatctcactggtccttggaagctgagattttaattgtgactacattgaatttatgtgcagatttttgaaggttgtttatccctaaacatggtatttcacagctgcattcttcaagttctcacagcaatagttgggaattacatataatttgttaatggatatctatatttgaagttttgtaaatgatgttatttaaatttaaattttgaaatgtttcttgctcacaaacataaaaagaattgattttctttatgaccttctatcctgcgggcttcctaaattcacttagggtgtctagtagctttgccactggttcatcacattttctaaaaacacaattagttgtttagcggctaaaaagcctgtgcatctttttaagagtgttcacggggctggagagataactcagcagctaagtgcatggatagttgttccagaggacctgggttcagttcacagcaccaatgtggctcacacctatggctcccagttgcaggggatccattgccctcctccagtcccaaggagtagcaggaatgccgatggtgcccagatatacatataggcagaacactcatacacataaaataagagaagtaaattcaaagcaaagtgttcaaggtgggagtgaggaagctggttcaacaagttaatgtccgctgtgcaagcatgaggtaaactgtgaggcaaaatagtgcacacctgcaatcccagcacttggcaggggtggggagagacaagaggatccttggagttcagcgtgtgagctctacgtttggtgagaacgcatgtctcaaaagacaaaagggaaagcaattgaagaagatgcccacagccaacttctgccttgtacatgcatgtacactctcacatacatgtgtgtgaacacacacacacataatctacatgacttttgcctcttgccttaagcttggctctgagaagtgaagcccactgctcttacctatgattgtatttgatggtagctaactgcagggtattgtttctttgctctgcctttgctccactgagggagttcccttctaggtctagtttgctgagaattgttttcatgaaagatggttgaatttgtcacatatttcctgtatgtatttagacatgatttttttctactcagtccaccattctttttactatattatttatataatagaagggtagagtctagttttctattgacaaggcaagctggcattcttgggatgaggcccattgatgatcatgtctttttccttatattgcaacctgttggaaacactgtatcattaaagatattttccctgtctttagagaggagatattggccagtggttccctttcttctggtgttttgtatgacttaggtatcaggacaaggatggtgttaaaagctgagttggcaaatacttcccccaccgcagaaagaactgttgtatgactcaagttatttgtttattaagtgtttgatagaactccctggtgaggttttaagtaagcaatttaattattcttaactgagatgatcccttcagttagtttagggatttttgttttctacaagagataattgtcttctgagggacgatttcctaacattggaagacatttgggtcacaaattgaggtgttacaactggcatctagtgggtagaggccccagatgctatttagtattgtgtgtgcagctcacgggacacctctaacacacaaccaaggcttagctttccctattgtcagtcacaccaagactgaggatctctacttcagaacggcttgtcaatgtcaaatttattatctagaatctgtttgcaatatttactatgtactcttatgacatctataacaatattatgtatttttccttcatatatttgtaatgttttcagtttttcccttcttcattccctgcctcctcttcttccctccttcccttattaatctaactaggggtttacaatttcattgatttatttttacaacaaatatttcagttcttggtttgcattgattttctttttggttcattacttttctccattgttttcattgactttcctattgtgttttggttttcaatttcattgactttgctctttgctatttcttcctgtgctgactgtagagaatgcaaaaataaccgttcatctcccaccctgcacatataattttcccctagagttaattgtataaagtcctgtgtgtacaattctgcatatgcatatgtatgagaatgtgtttttaaagtttattaggataaggtcttgaacacagtttttgaacctataatttcactgaataaattctgttgattacactgtcagataaatagtgtaaaggagaatagattccatggactttgagctggagaacaagcctttctaagataatcattaaattatccattacaagtttatctgaaagactgtagatcatgtcatcatatgcagctagagtttataaaaaaaaatacttagcaggaccaaacccaacaataattagatatcagatgcaggttcgccattattgtctagagaggatgaaatactaaagatcatagaacttagtgtgaataaaaaaacacagtctccctgagatactgggctcttgtagtgctttatcattgctggaggatgatcgcaactgtctcagtttaagaaatattcaagaatatgaggtaaacactacaaaatcaattttaattaactgtgggctggaaataggacggaagtacataatgttactgaatgggctttcaaactgcatactgtcatactttacatattattccacaatttaattcagtatcagcaatgcctttttccctttgatttcatacataaaattcaagctcatttgtcatttttggtttaagaacagaacccagtataagctaattcataaatcgttagttttgtcctttgggggcaagttctctaatttatggaaacataatgaagttagttaaaggaaattcatttttgctttttttggactgttgttgctgttgttggatttttgaaatacagagtcaaaatgcttcctggatacttatctttatagtcctagattagtgcttcgttcagcctgtcagagaagtgtctttatgcagaaggtgtcaggaaaagcagagacaactggtcggaatgaaatgcttggccttaaacaggacatctgtatttcctttattcctccatggctcggggaatattgtggcagatggactagaaagaggccagaggttggaaagaaatgttgtgaaattctgtctctgggcacaccatggacgtggtactcatgaactccctgcagctgtggttacttgctcgagacctgcccaaaatagacccagtaccatgtcattaagcatgggggatgggatcacgaggctctacccttgtcagagggactacagacattcagtgggtactgagagaggcactgttattttcctcagtgggatagccactgatacgctaaccatattcccatgaacaactaccactcacgctcaggcaagaaacgtcattaacttcaatgggtcaaaaacaactcaaagtaggagagtgatattagaaagatggagggtttcagcaggagtggggatgatgagagagggtagtgggaggtaaagattcccagacttgatatattgatatatgtatatggtgtgtgtgtgtgtgtgtgtgtgtgtgtgtgtgtgtgtgtgtgtgtgtgtgtaattggcaaagagtgaaagcaaaaggaataaggaaggagcctcatggcatacaactatgtaaagagaggcaggggacaatttgattctcaactgaattataaataagtgcattactcaacaacaaatccaggcccctacagtttgaagcacacgaattcagagttctgatttctcaaggaggcaaagccttgtgtgggtcagctgtgctcaacccgtgatgatttatctttgtagcatcccccacccccattctatctctgtcaaacactagaccttctttatagacacacacacatttttatcttgagttttcttccccatatagccacttcagaagatagtggcttactactttctggaagcttctaaagctgtttaactggtgggaacaaaatgaaaataaaaacttctgaataccagccaaaatgtcttctgtggtttggctagacacatatcctgtcttgtcataaattttgtttcttttgaatgtgttataatttgatgattgttccatgaaattaatacacagttcattttaaattttatctatttcctgtgcatgcaccacctgccttctggtcaagaccattcttaaaaatgggggagacaaggagactgcatgaggcaggattggcaggctctgtatttttacacttccaatcattttattttatttcgaaataaagcttacagaagacctatggtatgaaaattcttctacatctaagctattggagaggacactgcaaatatgatgctgtcaccattgtctaattagtccatatttcttacagatacgaacattctttcatacaccatggagttcaccatcaggaaagtaacaaatcccactcaagatctgctagttgtttccataacaaagttctccaggttgacattgtaagttttctcaccccaagttttgttccaagttctctagaccttatggtgaggaaggtttagaagccaaacattgcttctcattggtgcttcgatctttaatatgttggccagcttgtgccaccttaagcatcaacggattgcactatgcacctccctgcttcctctccaccacctgtctcctaggatcctatatccgtactttccctgaaacttgccttcctcatgctacctgtcattataatggcttcccgagggttctgtgctttgaatagttcatcccagtttcctggactttctaaaggtccccaaagctcaagagtttgcctggaaccaaaaacagacacaaaacaatagctgcacacacacacacacacacacacacacacacacacacacacacacacacgtggatccagtgttgtatcaagtttaaagtgtgctttgttagagagagttcctttcattgtcttgctctcaggatcaagtcttcatcatgcctcttgtattctcctatgtatctgtgctgacaccttgccagtgccagaagacagggccagaaaagatgtcagggtgtcagtgagaactgatgttgtataggttacaatgtccaatgttgaaggaggtaaaggattgtggtccagggcagtgttgatgtcatctttctggcagcatccacaggagttcaaagctatttattcacaatcaacgtttgaaaactattccaaatgcactttccctggcaattgctcccgtcagtttgagtttgtagtgtttcccatctctaaggacagaaattcaatgttatttgggaaggaaaggttttgaagatttgtgaactagatgtagggagttttgcattaaagcccacaagatgggtgggagccattcctttgtattcactgtggaaattacctaataaattcttctttctcagcagtaccatgccaaggttcccatttgacttctcatggtggcttgttgctatggtgtttagagatagcttctagaataaaatcctttacattgcctccttggtggttttgttcagagctcagagagtcagagaactcaacatctcctctgctgtttcttggggtccacttttgtggctctgactggaaaagttccagggtccccttagcataatctactaatggtttcagagcatataattggcatgcatcttttaggtttccagggagtttggccaagtccccaaccctgcatctttcaggcaatggtgaagcctaccatttctctcaatgggccatgattgaaacttcaccactaggaaaggaaattgagatcaaacaacctcttctgtttgataaaggaaaattaaaaaaaaatatattatacttctgtaacaaaatgttggattctgaatcagctaaaactcacctgccacatattttctgatctttcctactattttctccaaagagacctcattgttttgcttcatgtctactctatgaatcaccgtcaggtctccaggaatggtcatctgcactggtcctgatgctggggcatctttttgccctctctgcactgtgggacatggcaggccctggagaaagtagaggaggctcaccaccaaatagactttcctgcattggcctctacctcaacttggggaagatgttgccagcttcttgagaactgaaacatgcaagctccaaagagcaactttccctatcttttattctatcgacttattttgagtctatgcacatgccaccacacacatgtggaggtcagaggacaagttgcttcagtagattctctcctctcatcatgtggatcatagggacagaaatgaagtcaccaggtgtggcagcaagcactctttcccactgagctgtctctctggcttagacttccttatttatttatttattttttatttatttatttgtttgtttgtttgtttttcgagacagagtttcactgtgtagctttggagcctatccaggcactcgctctggagaccaggctgtcctcgaactcacagagatcagcctgcctctgcctcccgagtgccgggattaaaggtgtgcaccaccaacgcctggcgacttccttattcttttttttttcttttcagatttttttatttgaattagaaacaagattgttttgcatatggcaatcccagttcccttctccctcccgacctcccctaccacccccccaactacaaccctacctatcacagaccctttcttctattcttcccctgactcaacctttctgccccctcatgacctctgcatcctaaagagaggaaagacaacacaattgaagacttctcctctgatgttagtgccataattacattgtaagcagacagtgtcctttgggctggtgaagtacagagttccctgtattgtgcactaatggaccgagttgccaagctttcctctgttcttatatttgctcttaatttcctggctcattcttcactgtcaggaagtcagataacacatcttgttgttatttagctcttctttcaaatccacactctcttctaattcgacttgggcaaataacccaatgaaactagattttagatgtgtttttttttttaatgaccttgaaaactgatatatttaactaatagaccttagttcatgaaattggacttccagatgttcataatgttcacactgagctgcatttgagatgagggcatttgaagtctgagctccagatatggtgctagatggctattggagaatagagtttccttaacttgatttcacagcagttactctcagtcaacacacacacacacacacacacacacacacacacacacacacacacaaacacacacactcaaaatcttattcaaactttacttaagttaacagggggtctatagattcatcaaaaagtctagaggagcaggttgcagtaccaactgatgcctctagagttgttctgtctgtgtgggaagtgggaacactggcattaccaggaagctgctggcactacaccctaagaaactgcactgtctccagcacaacctccaccctcttcgtggtgccaggttcactgtgtttccctccatccgaggtctctcttgaacatttgtgacttgtgaactagtgaatggacatttgggaaccattgagaatggcagctacaagggaacctgaaggtttttagcaatagcaatacaagaagtaactctagaaaaggctttaggcatgtgttgagaaacaaatttatagaagtcaccctcacatgtaataatattactatacagcttggtgcaaactaattcagaattatctcatatacagagctataaaagaaaatacaaacagtgtatggaggctgacatctgatattttaataattgtatttaattttcctggcatgtgtttgggaataggtttgtaaattctatcagtatgtaagatatatgtgtgtggtgatggattcttcggaaaaatagaaaatacctcttgccttcagaagctgaacctttactgggccttacagtgaagttaataacgtgctttgagatcatttaagtgaatgcacttgacctgctgtcctactgtacactcagccggttcaagtttaacccatctttaaaagggcagcataaccaacctacttggctttggatttccaatgtgtcttagttagtgtttcactgctgtgaagagatgccatgaccagggcaatgcttataaaggaaaatcatttaattagggctggttacagttccgaggtttagtccattattgtcttggtggggagcatggtgatatggagcaaacatgtgctggaaaggtagctgagaatttctgcatttggatcctggcttgagcttttgacctcaagaccatcccccccccccttagtgacacacttcctctaacaaagccacacctactccaacaagatcacacctcctaatagagtcactccttataaacctatatggggccattttcattcaaaccaccacaccatagaatcagcatttacaacttaagctaaatatatagatttaattttaacttatatactctctttgcctctgagccagaatagtgtaagtgtatacagtgtgtattgtggtggtcacttgctgcaagaagcctccaggttgaaagcaagcttaaataaaacaaatacctcataagtgttgggagccacatgtggacatgggtaggtaatacctgtttatgattttgagtgcctttctggatcaactgggggtaaataaagtcaactctcccttatgaaactctgttaaatatctctgtccaaaatagtgtccttattcctttcccatgccatgtttttagtgtcattcagtaaatacagatcaacatcctttgttagggagaggcacagatacaggcacagcacacagacaggcaatcaggcatacacaacagattatagacaggccagtcaccacacacaaacagaagacatagggaaagaagtagagaatccaatttggactacctcttagtcaaactaatccaagaggagatttctgtgtttaggccacaatgtgacatcaacacatgtatgcaaaacacatttgtttctatatacgtgtaaacatttatatacaacatataaaatagagagagtatattaaggctggagttgaggcatgtgccaaacatgattgaccacagtatcccttgagcaagactctttaaatggctcatgctatccaggcattcatcagattgtaagccaggttctgattatataaagagaagtaatttggacaatatccttggaggagggactcatatgaaagaagtacaaacaaataattgtaagataacaggataaagtctgtggtaggaaaatagaagtctaatttttctttaaaatatccctgaaccataaacaaaaacagggatgcagcttaaattagttctgtgtataatgggaatgatttctaggcttggtgacgtaggagggttaataatctgaagttagcctgggtcatatacaaagatcccatttcaaagagaaaggaagccaggcatgggggcacatgtctttaatcccagcaccttggaggtagaatcaaggggctcaggatttcagagctatttttgactacacagcaaattggaggtcatcctgggattcattagatcttgcctcaaaaaaaaaaaacaaacaaacaaacaaaaaagcaaaacaaacaaaaaaagaaaaaggaaaaggaggcaaatatttgatgctttagtttacattttaaattcttaatttaaaatacagcaattgtatttttaaatgcttttttattaaagtatatgttgcttgtgaacaaaaatgttattatcctggatctgttgttcttagaaaatgaaactaaaatagcagagggttgatgctggacttggaaattccttctcctcactgtcagaatttttcggaaatctaggcccacctacatacacacctattaatagcatcgttcttcagggctttacgctctgtatcatttggtgaattatcgttgattcttgtgattaacacattcacctcattcaaggtttcctcccttgttgtaattttgctggagatggaaactaatgaagccatgtgtccatccattctgcagacatctcctccagctgaggcagcatccatctgcagagcagggggtgcatgcagcagggcaggctgggagggaacacgccgatcaatctgtctgtgcctgtgtagagcaggatacatgatatccttgaaactacctaggatttcaggacatggagtgataataggaaaagagctaattttagcgggctttgaaacacaatggaattttatttgactataaagaaagattaaatagtgaaaaattcaggaaaatggatggaaacagaaacaattgcactaagagaagtaactcaggctcagaaagacaaatattgcattttccttcccatgtccggatcctagctcctaacctgaacacacacatgagtatgggtagaagttaggaaactagaaggggaggcaagatccaggaactagtgactgaggcaagagcatggacaaggtaatagaacacttgtggtctgagagtggaaagtgggaataccggggagaatggtataaatggggtggtagactgaaaaagaggagcacatggagggggtgatggaccaaaacaaatatgtgaggcaatgctgtaaggaatcctattattaatttaatttcaaagttaaggaattttaaattctttacaaatgatccactcccttgtctgtcccttccacagatgacttccaatatcctatgaagtagtcactctggatgatagtactgtaactctcagtaacactctggatagtactgttaactctcagtagcactctggatagtactgttaactctcagtaacactctggatatactgtaactctcagtagcactctggatagtactgttaactctcagtaacactctggatagtactgttaactctaagtaacaacactctggatagtactgttaactctcaataacactctggatagtactgttaactctcagtaacactctggatagttctgttaactctcagtaacactctggatagttctgttaactctcagtagcatcccattctattacagctttgttacaaaaaaaaaattactcagtgcacttacagcctggatccaaagtgattatttaatgcattaatggattattcctgtataaaatttgtctttttgaccacctcattgagaacacacacacacacacacacacacacacacacacacacacacacacacacacacacacgtgctcatgcacttcataaacatcatctataaacatgagggaacagtacatcattcctatgtgctcattcaaatgtactatcaaccactgggttaaatttgttttctacccagttgcaagcacaacgctagctaacagcaaaagaaatattttttttgcctcattggtaccttgtgtaccttatcattgctgctgcttctttcttcttttcttcttctactacttctttttcatctttcttcttccttattcttcttcttcattctccctcccttcctccctccctccctgcctgcctgccttccttcctcctcctcctcctcctcctcctcctcctcctcctcttcctcctccttctcttctctaaagcagtttgaactagtttcatggattcttcacctcttcctcctttgcttgactctgcaaagtgtatctgaaattgactttcatttgacatcctgagcctggataagactgaattattttgtttgcaaatcttcttggggatatctttacaattattcatggctaattaacaaatatctccatggcaacaatagctgtgtgcactgattgcccagtgtgtttggtaatatggaggggtgttgcaggtgactctgcttgaacaccccttggggaagggggtgagaagaagcacaccaaggatgcaggcactgggagtcatttattaagaaagttaggcctgcttttataccacctcccaagctcccattggctcaggctgactgcttcattgtcctttcctcattggcatctccagtcagctgtctcttcctcagcagtctctgggcacagagataggcttgacttagagaagaagtaagtgcctgtggggcatttcatgcgagctggcctggtcagggtgactgcaacttgggcaggctggccagcagtttctcctccagaggagtaagggaaaaatgaacagtaacactggattttcaaataaccccaaagttactaagattcctagttatttcttcccaacagcaatatttacttatagggtgtttcctttatctttctttcactatgcctgttagttttgttcattgaggaccaccctcaaatgtggaagcttgaaagacaaatcatttgtgaagctcgtgattgtataggacagcaattgtggctgggctcagctggatggtcctgttgtggaccagacatatctcttagggcttgctaaggtatcctgctccactcacacaacacttacccgtgttctatccaaggtcatttattccccagcaagctcactgcacatcatgacctagggagaacaaatccagtgtgcaacattttccaaatcttagacaccatcacatttacaagaaattcttcccaattcaaggaatagatgagcactgtagctcttggtataggaatgatataaagtcacagataaaggatgtggacccagagatgaaagaaattgtggccatctttgtatcatactacactcatatgcgtgcctaaacatagagatacaccaaatttgaaaacgagatctactaatgtgtactaaaatttacatacattcaaaattttaagggattaaaatatttcctcaatctttaagtaaaatcaacactgaagaaaagcattcttcatgactcccaggttttgactgacatctgacctccaccacatgttcttgggtgtttgagaatgaatggtcagaattagatacataccaatgctttggtaccataagacacaagcactcactgtgtctgccacctggttttgaagaaagatgagagaggtggtgaaggggaaatgcttaaattcaaatttggtggtaagtagatagatggaaatggacacaaaagatggaagaagagccccgtagagccagataaatgtcaaaggaaaaaacaggatagaaatttcctgtattatttccttggcattgaggattcagggccatttcacacagtaccagataaatcaatacaataaatctttgttatctgtcactctgcagaactcgaggctaagatttcagatatctctctaaaatgttttttagaaagttaattgaattagaaaagaaataggccaactgatgatagattttctatcagctttttaaaggattataacccattggtttatgtggctatgaaatacttggcagtaagcattcataaatgcaaggaggacagggtggaattctgcctagaaatgtgagagatcgaagctgctttggaaagctcctggaggacacactggagctggaactaggagggtgatagatgaatgaggatctctgcccattcagccaagagtctactcagactagagagaaggaacggagccagccaagttgatggtgttggctagtccagcagaccatctctcttatgaaaacataagacgtgcgttcattcattcacactggcgtgaatccagcatttactatagcctctcacacatatatggatcttcccagctttggtcattgtttactccactccatcctgctaagtaactaaacagacatagaaaacaccaaggaaaccaatgcacatgtgagctcacagagactgtgacaagcatgtgcaagacctgagacggggaagttaatacaaggcagcttgtttagcctttgcaaatttcagtttccacaaatgaacagtggccattctggttgtgttcactttatgaaattgctgtgatttgacacagaaagtgctaggtacatgattggcaattagcaatgttatattggttttaggtagtgctgatccatgaagatttcttccctagtatctcagaagtcctacataggtcactgtggctgcctttccagaagctcatcagatgtgtaaacatcagtcacggatatcacttgaatctacactgtctattcacacagctagcttgtcacctttgtgtatatatcataaactagttaaaaggaaaccactcataacagtttttcagatgccatcacattaagaaatgttaggatggcttttgttactgtgacttttccaaaattcatgttttcagatttcatatctagaatatctcataaatgcacaactaacttgattccccgcagcagtttgttccactataataaaatacccaagacaagtaatgtacaaggaggacaagtttatctttgtctcatagatttgaaggtctcagttcattatggggaccacccatcacttctagatgtcctgtcatggggctgatgtcaatggcaaaggaagtatgtggtagagcaaactgctcaccttgtgaccagaaagcaaaagaggtgcatgaatgaactcaagtccccaagtcccctttgtgtcactcagtagcccaataacataaagacttctcagaagacccctcctcccaaaggttcttaaccttccaatattgccaccctagagccaagcctttggggacatttactattttaactatagcaactgagagtgattatccaagctattcacataacatttcaaacaatattacttaatttgcaagaaaccaaatcatccctgtggataaagtgatggaaaaattatttggtaaatgatctacacaagtttaaattccctacagtaacctcttgcagaataatttgcatatggcctcaggtgttgatttttggagtgcaaacacagctccattaagcacagcagctgtggccccatcgctgctgcctccaccacagggttagttgaaatctgttcctcagctcccctgtacctacattttggaaatagttgctcagttttctgacctccatagtctgtcttttcccgctctctagatgaaatgattttctggtggagcccattggtgcatttctaaaatagttctcttgggtttaggtgatggtgaatttggtaagcagagtgacctgtgtttgatctgacccccacaaaaaagcaaactatggtggcataatatatatatatatatatatatatatatatatatatatatattgtttttcgagacagggtttctccttggctttggaggctgtcctggaactagctcttatagaccaggctagtctcgaactcatggagatcggcctgactctgcctcccaagtgctgggtttaaaggcatgtgccaccaacgcctggcacatcttatattcttataaaataaagtcttataatcccagtggtgagaagatagagacaggaaacctggggtttctgtccatgccctgtctgatggtcgtgtcccaagcctgttagagaccttgtctcaaaagacaagatggacagcgactgaggaatgacacttaaggttgtcctctagccgacaaatacacatgtacacccacaggaacacttacacacacacacacacacacacacagagagagagagagagagagaggggggggggaaaccaaattttcatttagatgaaaaaatgcataattttagcttccagaagcctctatcacatctggtacatagtaggcaccgtttttaacattttagcaaatacaccactaacagaaatgtaaatttctgaaagttgaattttggtacactgtacatttaatatcttttataagactatctacaaagaagcattcatctcagttcacacattatgttgtcatatcttataaattcattgtgcactgtaggcccaacaactctggaagatagtctgagctgatactcccctttcattggtgatggtcttccaagcaggtgttttaatgacttgccccagattaccaaggcagtgattggaaaactacaaagcctgtgttctttttagctgtagggcacttaagacaaattgtaggcaaaaagtatttcatcagtaaacatccaactgctagaaataaatgaaagaggagaatctgaagcaatttagaaactgtcagggaaatcactgattggaaaatgtagtcacaaactgttctgatgagcagcacatcccattttccccacaaccccttttcagaggaggcttcatcattctacttgggttggggggaattctgaagggatgtttagggattggcaggtgaaggtgcctgggttcattcacctgtgaaactcaaatagtgtgtgatggaaaaagcttgtagattcaagatacctttattcagataaataccagccaaatgcaagccagagcagcaaggctaggtagaaagggaagcagcagaagaagaaaggctcccaagtgcctgaggtcccttaagagtccctcctgagtcatcctgacctcaccttgaccttgcctgtcaaggagcccttaggaggcgttgttagtcgttacggtgtcttcctacaagtgtgcttttaacttccagacattccaggctcttttttctcaggaggtcatagactgagtctatcaactacattatgaaggccttctcccaacaactactagctggtgaggttcctactaggacctccctgaactattttgtgcaactggacctgtagaaaatgaggatctgtctcagaactcacccattcactcactagaagtgcacacattttcccacctgttttctgtgtttgttaacaactactgtatctggaagaacactggccatttacaaatagaggcttgtttttctcacatgacttagagatgatggaaatgaaataccaaggcccaactataatgtcttgctcattaaatctttgagggatttctgagctctgtggtatctgagaagtaaacctttaccctccttgacaggcagtgagtgggtttcagtgtggcatgtggattgaagcaacatgccaattggttcaacaagaagacaactttgagtctgggcctgaggagtaggttctggtgggaaatagctctatatcctcatagtgttcaaactgacaaaagatccagaacatgtgttaggataagtgtctttcctattcttccttcatggatgatgggtggatggatggatggatggatggatggatggacatgtacatgaaagggtaggtgcatgggtgggtgggtggatgagcagatgtgcttgcttaaacagatggccctattagcctaagaagttatattttcttgggtttctggggtttttagaagtttctccttctagacagaaacagctgctacatgacaacatctacaagactgttcaagaagataatcaggagcatatgggcagttttaacaaagatcctacttaaaaacaggaaattacaggtttgctagatcctcacatttagtgaaaaaaatcaatatactgagtagttatttgctactatatgtctttaaatatttctctgaattattttgtcctttcaagtatttatcatgttaaaatttttattaactctttaaagttttaatttgcagaacagtcatatttaaatgaaataggattgtcatcacatgctctaaacttcttgtacctttgggaaatgaactgtgtggatcacaggacatagcagttttgtcctttttatgtgtgaaaactttgaaggtgtgtgatttcatgtcatatgctggccttgtaaacacaagctcatagggtgaaatcaaatttccaacaagagactgtcaaatgcagtaagtgtgacttgtgctactcatactagccatttttatacatgatattcaaacagcaaggggtgtgtgtgtgtgtgcacgcatgtgtgtgtatttacaacttcactaactttcaggctctaacttgggatcaaataatttagttcaattctaacacaaccccataacctaatgatctaactggtacatcaaattctccaagtcaggaagctaagtactacagattgccctattccataagccaagcacaagcccaggctacctactgttctgattggctataattgggtccacacacctttcctttgtgtctaagaatttgctagaacagttcagaggaaatcactttatttgaccattaaatgaactggcttgttacaaaggctgctattcaggagcaaccaaaaggaagatgcatacaacaagaaaccaatggatgaggacatccataatctctacagaggctccaccttccagcacccagctgagttcatcaaccagaaagctccctgaactccattattgagaactcctatgaggtctgacttttatgcattggcatgactgataaatcattggccattatgattaggttaatttccattcttacaggcgggtgtggggttcaagttctaatcttcccatgacaaggttgaatctcctgcaaccagtgctccacattctgtagatacaaagagcctttacctctctagcatatgctcaagtatgattgaaaggggtttattatgcataacaaaggtaagactttcacattatcactcataaaatttcagggcttttagggcctctgcgtcaggaaatgtaaatgaagaccagatatgaatttctgattatatggcaacattactgtatgcttttgggaaaacacacaaataagatggcaaatattaaaaggaatagcacttgtttctgacacctgagaaggctgctcacagtaggtatttctgatttatgttatcaagctaaccatttgggtgcaaacatcttctgatttggcaacatgctgggtgaaaattagaatcaaatctggccctataaagtacagctaaataattgaaatgtaatgaaagtttaagatgttacagaagccttgccaagcttctgtgctcccagcattacctccagtgttctcggttttataagacaaagatagatgaactgaggaagaactctgaatgagtgacactctgtgttggaaacccaaagatataaaacctaagttttataatgataaggacacaacagagacgtttctttgcctgtgaacttgctagattctcatttcctaccctgtaacttcattcttgaatcataaatttagtttggatgagctaagatgtgctggactaaccagtaacctcccaagcgtggcaggcagaccttctctcatgtgtcaagtgtgttgaagattttcagagatctctgatcattgtgttcttctggtctcttcttttcagagcaacacaaatctcagttgttcctgctgtgaccaaggaatctggctcaggaaattaaataaatactcttacccataagcagtattcatcatttctcatcattatgtgttattaggacccacaggaaccaagaagcccatctacaaatgtcacctaaaatttggaagcaagaatattgagtggctattactaagtcactgaagaccattgcatgggacatgcttgagaacttagtaacacatgttgagtataagttccatattgaaagaaatttaaagagaaacagtaatacctttagattttttgaagaaaggagaaaatcagagacaaaactgcaagatgagaagctatggaagtagcatgcatgaactttcctcagtactgagaaacattaccacatgttttctattaggagatggtatttagttgttcttaatcttggcttccagcacttacttacattatagcctgcaaagaatcagcaataaaacaaacttacacatatacttgagaaatggagagatgggaatatacaaaacatctaaatggctagatagacctcctttttgttcctgagtgtgtttagatgcacaggagcagagaaagagaatgatcccagaaaagaaaatgtcctggcataaaagcataaaaatgtaaatatttcttccaagataagatataattacattagagttcttctgctaggctggtaaatgttctgctggagacatctgatgaaaaacttcttgcttgactctgatcatgtttcgtccctccacagaagctgctagaggcttcttttcctaagttcctttgcttagtcaccaaatgcatcagtaattgggaagtttagaaaatacatgttagacaaaatcttaccatgctcatcatgcaatggcttgtgagcaccagacacagatactagaacacatcagaactattcagattaattttcattccatggacaaagtttctgaaggcaaatgtacccacaaagaatggggtgttaccttaacaacatacttctgaacatcaaaaggccagccgtgaactcatctagtctggctcttcccaggagagctctgacttgaaaagataactataaaagctgtcggagaggctgtgtgctacagtttccagaggcctgtgctgttcccaacaggctcccctgtgcttgtgtatttggtctcagctgttggcgctgtttgggtgggttatggcacctctgaggcatggctccccggctggcatggcctgctggagataggcgttgaaggtgagatctgcttttacttctagtccaaaattgtggctttctacatcatctagctgtaagcaaggtgcggctgcaaacacttggaccacaaactgaccattctagccaccgtgccttccccatcacaatggacggtactcctaagactgtgaaccaggataaacacttcctccattaagttatatctgtcacactgagaaaaaaacaactaactcagtacacaacccaacaataaagcatgtttttaaaaacatcattaaagccaaaatcccaaatgaactggaacccaaaacaaaagctaaaaatcccaaatacatattttttttaactttttaaaagttttttcgagacagggtttctctgtattgttttggagcctgtcctggaacttgctctgtagaccaggctggcctcgaactcacagagatccacctgtctctgcctcccgagtgctgggattaaagacatgtgtgccaccaacacccaccaaattaaattaaaaattgttttaataataagggaaaagtagaatcatgagagttagactcactgcgttaagatttatttcatttttaattgtgtgtaatgctcatgtctgtctgtgtagatgtgtgcatgtgggtacaggtacccacggaacacagaacatccttttcctgaagcagagttacagtcaatgtgaattgcctgctatgggtgctggcaattgaactcctcaggtctcctgtgggagcagtttgtgctctttacttagaatcatgtcttccactcctacttcttgacatggcaactgcccattaacaaccaacaggtggcagaaccagtcgactataattttgtttatatcaggcaacatagtagggctacatgattagagacagaacaatgaacttacaggaagaactatccagaatggtgagcagatcttgtattctaggtctcagctgtggagaccattgcttagctaatggggaggcattgccagcttgttgtttaaagaatgaatgggcgttctggtggcaagcggagaacacaaaggtatttatgtctagcgtaggatgagaggttaaaaaccaatgcactaactcatccgagaatactggaagtcccagacaaagcaaggtaggtggggtcagggcaagggttcttagaagcaagacaggaaactggttgcattcacacctgagaacctgagattcctctccaatgggggcagtctcctgaagagttagtgttaggagagatgggaggacttgagataattctgagttgggagaatttccaggaatctacactctatctgcatgatacaaagacagccccttgacagtggattgccaggtctgtggtagccgagtaattaaatctaaattctaaataccatccaaaacaaggagaaagagtatcctcatgaaaacatgcatgaatttagaagtcatagatgtgataagccagacactgctcaaggattgtgacaattaagtttttgtgtaggttcaaagtaggcattactgtgaagaaactctacctcaagactcatggagtaaaaagtcaccaacaagtatcttgggctggaataaaacagagagcagttgatttttgagacagtgctttactctttaggctagactggcctagaactcagggtaatcccctgcctcaacttcctaaatgctggggttgtggcataagccaccaaacctgactgccaaggatgttgctatgtgatgtggtgtctcccaagacaatctgtggcatgttatgctgacagttcaaggcctggacaataaatatggcccctcgagtcccagaaatctataggtcttcagcatttggtagtctctgcagaaggggggtgtttgatttgcactgtgtcttacagatctcaaggaggcctcctgataggctcagatacaggagacaagtctataggaactccttgtgcttaattatttgtctggcaagattacttgcagcaactgtggcaatgtaaaaagtcagacccttttctgacttactcctccttcctgaattttcagacatttgttttcttcttaaataacctagctagtatcttttatgggttcttaattgtccaattagcttacttagtatatctttatagttgatgctaagtatggctcttcaagtctatggatgttttcttattgtttaaggattcagtaaaatgtatgtgcatgcatgtctgtgagtattcacaaacatatacataacacagtgagacagcatatatgcagacacatccacatacaaagcaacacacttatacacacatgcacattctatagtgactacacattttggagatggttatctgtggtcatctccctcccacctctatgcttattgtttatgtcatgttgaatgccggtctgcctgtctacacaggagctaaacatatgcttcctagttatactcagagaagaaaacagtgataggcatgaatgctcgttgtagtctccatggtaatcactatttactggcatccctctgatagagcccatctttccaaagaggttatcagtataattccattgggaggttaagctaattttcatttcatgtaggtataaatcaagtaagatttgatctttacagataattgaaaagatgggtaaatgatacactgacaaattccgtgtaaatgtaaaatataagtcaggatattagcatagtaacctattttcaagagattcttctaaaaataccacaagcacattcttaacaattgtcatgaatggtagggatgtttgaaaaagcaatgtagaagtttgctattttatagacttcttgtttacatattcacagaaaagagtttaactggagttatccctcataggggacagtatttttcccaaaagctatatgttggcaacgaaaaggcccagtaccagatatggattactccccctcaaattgttgtcctatgtgtcccaaagaccctccctaagtaatacagtctactgctattgcttttggttgcccactaggatttgatggtaagaccccattgcttatagcaacacctactctgaccacaagacaaaaagaaattgagatacaactgaccaattaacttcctcctggctggctagttttcatggttccaggatgtactatgcaggctgctggagaaaaacgtcatcaacagacttacccagctgtgaactctgtgatattatgggagcaaataaaccattttgaattggatatagggccaaaagaacaacattgatcacaagaattctcaccttataaaccaacaacaacaaaaatctcacccctagctgaggaactatttgttcattagtttttttattttttactcgttgactcatttggagggggtctgctggccagctcccaaatacatacacacagagttttattctgacttatgaatgcctggccttggcttggcttatttcaagccagcttttcttaaatcatcctgtctatcttttgcctccaggcttttaccttttctatttctgtatatctttctttacttattagtccgtgtctggctatgtggctagcccccagtgtcctcctcgtctgtctcttgctcctctatctccctttccccagatttcttctcgtatttattctctctgcctgacagccccacctatcccttctcctgccttgctattggccattcagctcattattagatcaatcagatgttttagacaggcaaaataacacagcctcacagagttaaacaaatacaacataaaagaatgcaacacatctttgcatcattaaacaaatgttccaatataaacaaatgtaacacatcttaaaatattccacaactattggtttatcaagtgataatcttgtgatccatgttgctcttttggtaatctttttttacatagccttaaattattttaaagtttttgtctagattgcttttaatctgggatatctttgtatacattctaaagtttctatttgtgagaactacagaaactggtaaatggaaaagtgatccagcttggagctgtatagctgtataaattaggtagtttgaagtagtactgatcattataagctctctctctctctctctctctctctctctctctctctctctgtgtgtgtgtgtgtgtgtgtgtgtgtgtgtgtgtgtatctgtttccatgtcctcagaagtagtgtgcaacaatcgcccacttggtcagctctggggaagtgagccaatctgtctcagaccccaaggtggatggctcctgagtggtggcacctgacgctgtcctgacttccacatacacatgagtgcactcacaccatatgcctgtgcactgaacacgtaccaaataatctacaatgccatgcttacaatagacaagaattccaaagtccacagagagggaaagaaatcagattgttttgtatagttaaacaaatagaacctccacagacatgtttccaagagaaacagaaactagccctgaaacaggaggacgtggcccttcatacatgggtcaccttttcctttaatagtaggggagtgatcatccatgagagcagattggctttatctagtgaggaaaaatatctaatttctcatatctctataatataggatcattttgcaagccagagcaaggagttaagcctttactgtcaggaatttggatgtagagagctagcccccttgatgttcatacttgtaggaggtagctcaggtctttagaaagatatatgtgtgccacaatagtgatatactgtgtagaatttaaaagaagagtagaggctggtaatcctttgctctatgtcttatatccatatatgtgtgagtacattccatgtttgtctttctgtgactgggttacctcactttggatggtttcttctagttccagagaagcaagaaaacaaggaggacctaagagagacatacatggtcctccagtgaagcagaaaagacaagagaccctgaacaaattgggagcatgcgaggagagggaggaaggtaggagaaagaggaagggaaagagaacataaggtcaggaagattgagtagggagaggagtagaggagaacaagaaaagaagcacattaatagagggagccactgtaggtttaaagataaatctggcactaaggaattgtacagagatccacaaggatgaccccagctaggaacctaagcaagagtagagaggctaccttaaatgcccttcccctataatgagattgatgactaccttaaatgctatcgtagaaccttcacccagcagctaatggaagaagcagaagcagagatccacagctaagcactgagccaaactcctggaatacagcttcagagagggaggggtgatcaacaaaagggtcaagaccatgcagggaaaacccacagaaacagctgacctgagaaagtgggaactcatggaccccagtctcacagctggggaaccaacataggaccaaaccaggccccctgaacatgggtgtcagctagaagcactgggcaagtctatggagcctctgatagtggaaccaggatgtatccctagtgcaagaagtgacttagggggccatttcccaagaagggagactctcttagcctaggtacacaggggagggcctaggccctgccccaaatgacttgacagattgttgatgatccctcatggaatgcctcaccctccctgggtagtgggtgggggatgggatggggagcagtggggggtatggaaaaaagggagggagaggggactgggattgatatgtaaaataagatcatttctaatttaaatacaatttataaaaaataaaaaataagatcatagaaacagacacacacagaaacaaacatacacacacgcatcaagataagaaaaatattttctttttaaattaatttttcatcctggcagcagcagttttccctctctcctctcctcccagtgtcccatactccttctaccccattccagccctaacctactcctcctctatataggaaagggcagatatcccatggatgtcaacaaaacatggcatatcaaattacagtaagactaaacacctccccctgtattaaggctaggcaagatgacccagtaaaagagctgaagacagcctctgctcccatgcttaggagtcccacaagaagaccaggctatacaactgtaacatatatgcagagagcctaggtcagtcccatgcaggctccctggttttcagttcaatctctgtgagcccctatgagtccggttagttgatgctgtgggttttcatgtggtatccttaacccctttggctcctacaatcttttctccctctgtaacgatacattttctgccagctgcccaagcctcgtcactatgtgggcacccaaaataacacacagagacttatattaggttctgtgctgctggccaatgactaggatttcttatctgctagataattcttaattatcaaccataactattaatctatatattttataagaacttatctcattgaggacaccagccgtaggcaccctctcttgcttgcaatcacatggcgactacagagaagagaggaggaggaagagagtgatttcctgcttgttctttcttatattctgagtctgcctgctatgtcacttcctgcctggatcacaggacttctctttactacatttcccagaatcctcctcgactcttagtcctgcctaacttgctaaactattggccaacagtactttatttatcaaccaataagacaaacatacacagaagaacttcccccatcatccctctcatctgcctaacatttggctgtggatctgcatttgtttccatctattgctggatgaagtctctctgatgacaattgggttaggcacaaatctgtgaatgcaacagagtatcgttaggcactcttacatcgacgtattttttcctacagtcttgtttggttctatcctaaatctttgggtccagactgtgggtcctggtgctccaggtagtgtcaggggtaggcttagtctcttggcatgggttttaggctagaccagtcattggtgggccatgcctcaatctctaggccatccttaacccagcacagactgtaggtcaaaggttatgtggctgggttgatttcccactccctccccttgaagtcttttggggtcacaggagatagccagtccaggctacatatccaggctattactaagagtcttagctggggtcaaccttgtagaatcctgagagatttccttatgccaggtttctacctgaccccaaaatgcccccctttccaatagtctatctcagtactctccccctttgcactccaccccacccccaaaccccccatattacctagcttctgtgggtctgtggattgtagcatagatatcctttattttatagctaatatccacttataagtgagtacataccatgttagtctttcttggtctgggttacctcactcaggatgattttttttctagttccacccatttaccttcaaatttcctgatgtcattgtttttaacagctgagcaatacctgtatatgttttctaaattgaatgctctacagcagaggggaaagaaatctcctcccctaagtccaataggaaggattatcctctcccttttaacttgtatttgtcctttaaaaatgggtgaagggggcctggggaggtggcttagtaagtaagagaacttgttctgcaatcctgagggcttgagtttgagtcctgagcagtcacataaaaagccaggcactgatgtgtggggtggatccaggcagatgtaagatctcacttgcatttctggttcagtgagagtcctgattcaagacaataagtcagagaacagcagggcaagatgctagatacccttccttggcttcaacatgtgcacatgagtccacacacaagcaaacacgcattcatgcatgtacgacataccacacctaacacacacacacacagactcacacctatatgtaccacacatcacacatctacacatccatatattatacatattatacacactctcacactcacatgcatgcactgcacaccccccacacagagagagagagagaaagagagagagagagagagagagagagagagagagagagagagaatgaggcctttcaactgtcagtactgttctctgtcccacaaaccagcacgccttgattaccagtgtatcagaaggattaattaatgctgtgttttcacactaaaaatgaagttggaaaagctccaaataaattatcatctaccttttatagacactgacaaaatgattcactttgatataatctgcataaacagggtcctaaactgtaaagttgctaattgttcttgcctcacatgaacaccagagtctgaatgtatagcaaagtaaacactcattagtgaatcattaatgctcttccaggatcaggccagagttttcaaagtaaccaaaacagcatttataaagaaatggattaaattaagggaggtgcgtttgaagtcaccctcattttatctcgcaacaccagattaatcacaggtaccaaaatgttatcctaattgagctaaaaaaaaaatagtctttgattagagttattttaatggtgtctccaatttgttttttatgtgtaaatcaaaccacggggtgctcagaagatattaattggtgatgagattaatcattcctttgggtcctattcacttgataccaaccccaccctgatgttagggagagttgagaaattccattctttcatgcttcattaagcacagcaaaaaccaacataaaaaactgacactgagatcttctcacccaatagtgaagattcttcctggccccttatctactgtgcagatgtggaaaatgacacagttgccgtaaggttggtctttctttggtacacagagcaggaacatgggcattaaaaacgaggctagattaaaagacagagaatcttgtagatgcagggaaatgggcccctcactctggattccagttgatgcctctttccagcagagaagcagcgatgcagcatagctagcatttgctaaaggccttttccatcacacgataaacctgtacttttctagaaatgtcatcagaaccccttctccatttgtaggaagaataaaaatcttcacctcttgtacagccctaactcctggttttatttcccatccaaagaactctataatctcacttaccaagaaatgaaagaaaaaaaaagattttatagccttttgagatacaacttaagagcaaccaaaatggtagacttgtctattgctaagaacctaacagtgcctcatcattcagaaggccactctggtgttttcagttccctgccctttccctgggtgcctttccgtttgtaatcaactccaaatctgcttcatattggcttgtcctgaagttcctttctaagtcaaaggtaaggacccacttatctgatttgaggtccctaaaggggtaaaggaactgcttgggctgctatgggtgacagcatgcaactgggtctctgtccctgatgctgttgacaggattccaagaatctcttcattcaagcttgatttcaccagcccagagtcctctatctgctaacctcatctacagagtggccaaaaatactctaatcacctccgactgatgcccctcacgaactgccctccctgcctgtggctctctatgcatcacctcacagaaacctgagaagaggaactgaagctcgaggttaagcattttcatgaggtttcccagcttataaagaacagggtagaaattagcaccagatctcttcatcttcaaagagcatctacctgacgtttcttcccatgatcagaggatattcaatctaactgaatatcacttaaggttcaaggccatagggaaatttcattccccacaaagaaatctcaggtcattagctaccaacaacacaaggaaaagggctcagtgaacgctccaggtagttggaaacgttcaggggtctgctttgctttttagtatttcattggtgagtttagaactcccctgcttcaggtagtgttggagtccccaccccacccccttgctggccatcagctttccatcacttcctaaccattctgaggcacctgccacaaccccatggggtagagagctgagaatttactaggcataagggaacattttagtttagcaagagaagagggacctggggagagagctcagccgataaaaggcttgctctgtgagcaagcctacctatacaagtgcacctgaatatataggagcacattcaaacacatattcactcaatgacaatggcaaaggctgttagtctgcccggctctataagttagcttgtggaatatggggggaagcaatgatgtaagttacagagggtttaatatccagcaagatgacctgagacaaagtcaaagaatattgcaccatcagatctaccagattctgctatgtggaggagtagactggccttttgctggggcaggctgcgcacaccatgagtaaacccttattggcgaccatttcttaacaaaactggtcaaaaacatccttgaccatggagcagtagagctgacaccaccacagacctactgggtggtagtttcaaccagcttctaataagttcatgattcaaataacttgaaaagtatattgtatgagtttctaggctttgaatatacatttaaatatatttatgatatatatgcatacacatgcaaattgaggttgtttattcaagaaataaatacgtttttgcttatgaatatgatttttgattttttttagtctcaggcagtgtggaaaagcacagactatctgcatcatgatgaaacttggggaattccacatgaatattatttgatttgtgtcttcctcagtccctaagagcagccacctcaggttagcgatttcatccccaatcaagcaacagtattccatcttatctgggccaatttgcctgctgagactccaaagcgcccgcatgattcattctgtataaaaatcatttggtttttgtgctcgctgtagataattggttcctggcaccagaacttaagctatttacagtgcaagtctgttaaaatgacactgaaatctagctcaaacaaacacaatcaaagtcaagggtatgtttttaaaatgctttttactgcacctgttgaaattaaatttaaaaatgtttttttccacagtgcttattgagaaaaatggaaatgaggaaggaattccaaaaccctgatccaataatgattttattccatttgcacagagagaaagagagaaagctacagatttaggaagagcctttcaagaggcagatattctctgcgtgggacagtgacaaatggtgtaatttgaggatgtcacatcttatttaccttcaaatgacaccttgtgtgcagaggcaaggaccctgtaaaaatgactcttgtctaagaaggcaatatgttaatcagttttgtgataccaccatcctgtggttcactgacctaagtggtccaacaagtcttaaaaactctcaagagtgggacatttgggcctgtaactttccactcctggagggcagaacaaaaggctaaaaactttcaaatgagaagtgaatataaaagtaactataagagctaagacttatggggtatataatatgtagtaagaactatagtaaaattatgctgattagataatctgtataagacacgtaggctagtatccaacatatataaatgcttggcatattattttttattaagtgaattgtagcattttgaaagagaacagcatttgttgaggtttcagaatctataaccatgaattagttggataaattctcatggtgaaaacaactgtatatttttcttatatcaaataccacatagtaaagtgctcgttaatttgaagagtttcaaagacaggcaagaactcccaagctaattaatttttggatgaagtcctaaaatggagaggtgagcagaatattggaggatgggaggtgcatacatgtggattgagacgctggtgcagccaacgtggggcctgggtctgagactgtaggctgggacagaagctaaggccaggcaggctcaccagagacaggggcactggaactgcccagcataaggacaaaccatatctaaccaaattcacttgcaccctcaacccagaggaatccagaagagcaagatagcatgaaggtaaagcaaagaaaacccagaaagaaaaaatggaaagttcccgagaaggcctatggcttcaggcctctaaactcatgtgaatgtacagcagtaataacatctctaatgagatcaaaggacaacaggagagagagagagagagagagagagagagagagagagagagagagagagagtttaatactagagtataatgtgtagatagtgcacgggttgagaggaagatgaaaagggtgaaaatattcttgaaggcaggcattgtctgtgaggaggaaatgggaatccggattaaactgggtgagttaagtaagtatagtataatttctatgataagtattcaaatgatagaaaaagagggtacatggtaaaatatggttaataaattttttgaagaccaaaacagagaaaggaatagtaaacagacaggaggacaaatagaaaaatagcagggcaaaatgaatcaaagtggattacatagatagacagaatcagacttgagctaaaaatttatttctgatagtactgtaaaataaaacgaagaatctctagcaatatgcagtctacaagaagtaattcaaaagctcatacacttgaaaaaattatgcacaatatatactgaaaagatgagtaacataaaccctaatggattcaatgatgctagcatacaattgaagaacacccttaatggtacaggttcacttcatagagtaaaggttttcctttatggtgaagtgtctatggttttaaatctatacgcaaccaataacacagcttcaagatataaaagataaaaacggactaaactgaaaacaaaaagcagggaaatctattgccctaataggggattgaagtacacacctaaaaaatctgaaaacataagcagggagaagaaaactgtgttggaaaggatttgaacaatgccaccatgtaccgacagaatgcgtgtaagttgagcatgacttatatccatgtcttctcacttgtatcctttccatatggctagagcccaatgctttttttagaaacattggccagagaattttctctacaactaagggtgtatatttgggtatggtatgcacttgtatggtttgcatatagtcaccaaacatatagatattggtcatatatcttaccttctgtaggccttattcagctaccctgtgggctgaggggaccagtttcttaaagctcttttacctcactcatggctgaaaatatgtacaaggaagttgtggagctgtggaaaagattctttggcgctctaagagtaaaggcgttcaggccatcatgtggtcccaggtaaccaagaattcatttctggtttcatcaggaaacttaaaaacaagaggctggcctgtgttctttctcagttccttttctttggtggtaactgtactccaaggtggtcttcagcaatggcctcttccttatgttcatagccccatgtggtttcctcttacagtgaattgggctgatatgtcaacaacataccattgaaatagtggcaaaatgacttcgacacattgtatcatcccctggcactttggggttgttcacccaggtaaagtagtcactgagctgtcactgattcagcagtctcacgaagaggcccacagggtaaagacttaaggctatcctccacagacatctctaagaactagacagtcatttgagggagtcatgttagaagcagacttacttctacttcagtcttcagaggactgcaatgctgacagctagactctaccagcatgggcagccctgagccagaaccacccagctaacacactcccaacggtcaactcacagcaactgtgagagtagtgttttgaatctccagatattgaggtcgtttgttcccaccaatagaaataagttcatctactagccatgaccttttcccagctcctctgcctccattcaagtgctctgacaccatataggttcaaaactgcagtgcagagttcagagttattttgggtcttcctcaaatctccaataagcagaagcaaaatttatgacctgaaagcagtcctggaggttgtcacaggtggagaccgggtgagatgtggtcagaggtcctctcagtcttaacaacaaacttgtgagtgtggcattttgcaaccctgataactgtttccctggtgaagtggttgttgtgtaacccgcagagcatctttgttgctatagcaatggtcatgtttggtttctaagtttgaaatcagaatgtccatctatgtgggaagtgagcagaagagaagggcttaaggaaaaaggcttagagaagcttctagggcactgggtctgtatgcacaggaaaaggagaaagttcctaagacaagttccatctctgacatggacagcatgaaagtattgtgaggccatataagaagtctgatctgttgtttagtctcaaggagagggtgaaactgaggatgtgaggccaaatgcagatcctaagccaagacaaggactggctctagatgttcctttgaccttgaaactggtggtctttttggacccattatttgtatacttggttcacttggactgcatgttctgaggaacagttgttaggcacaaaaccatccctgtcttatgttagttttcggctgcccctttaaatatgtcccctgcattctgtattgagaccagtgagaggacatttaatcctctcctccctagaatgttaggtcattactaaagtaggtaatgttgccattgtttctcactttactgttttgcaaacacctaaaagagtaacagctgtggtgggtattcactatcagttactatatttgaaaaagcagattaataaacaaatgataaggaaactctataaatctgaagatctaccaagaggttgaaagatgccagtgatgcagaacaatgtcatattaagaagaggtaaaaacaagaatcctagattttgacctgatgagcccttgatgggatttggtgaatatgctgagaggctcctgacacaaggtttgatttcagcctctgaagtagaagggcaccgcatggagatgagccacgatgtggaagtttgccccggatggtgagttctaaaacaggggtggtaagaagacaacagtactaaatgccaaccatggttctcagacacagctaaggttgagaaccatgttttcttcactgaggaatatgttaagctgcagagcaaagactggctaccacctcacatggaggcagaatcctggggtggcctgatgattgtcacatgataagatgcaataaaaccaagcacaatgataacagcgcaaggacaaccatgttaaacagttgccttggtttgaccctgtgtccccgacaggttcttgatttgcatgctccatcccctccagcactgcgattttgagaggttctggaaactcaagctactgagacttagctggaggaagtagaccactggaggaggatccttgggaaactctctgcctctggtcagtcaccaggtgagcagctgtcctctgccccatgctgccaccatgatgctctgctcaagtgtgtggggccaacaaaatgagtactgtaacctctgaagtcatcagccaaaataaatatcttcctaatcgaattccagcaagtgttttggtcatgatgacacttaagaaaccaatgcttcaaagtgacaaagatgaaagcacagagctctcaactatacacccatatgtgaatatctgaagctcaggtacaaacctgaacagtccctgcattcccttggagaactagaaccaggcttagattagagttgtggccctactatgtgtttccatattccctgtgaaaaccttgccatattagaaagaaattgtttcttgtttaatatgtaccttctcgctagctgttacctccttgccaacaagggctctagcctgcttactcactgctatatcctcaggacttagcaaattcctggcacaggggacaaagtcaatatatgtgaagttaatgaagaggtgggtcagtgaaggtagagaggcccatttatcactctctctgttttcagaaatgcactgtcagattggaggatttgaacctctcggaaggtgaccactgccgccggctgtggggctctgtgaagggtctcaggtccctctcctgagagaatgatgcctgacatgaatgcaagatctgtttgactcagctctaggtttccagggtgtctggcacagtgctttgttcataatgaataagaattttaagaagccgtgagatggatagatgagtgttgttgccattggattatatatcctgatctaaagaggccacaacgaaactagatgtggtggttccctctaatcccaggcctttaactgaggtaaaaggagtgttgtgagttcaaggccagcccaaactatacagtgagttcaggccaatgtggaccttagtatcagatcttgggccaataatagtaataacaatgaaaccacaaaccacaatgcaacttaaggtggaatttcagatattgtgctgcctgggtggcagagacactgtgaagaaaaaacagattttatgaggacaattaaatcatcagatttttttttttcaattcaaccttttggaagccaggcactgctccaggtagacattaatgagcaagagaaacatctgtcttctcttctgtgatgttccctgagccttgtaaggcagggggttgatgagatgtctcatttaggactgagcactcagcccaggccattcttctcagcctatgatcattgtcaccacacaatttctagtaaggtccaaaggaacagacaataccacttccagagaggacacaaaccaactgaagctttcacaagttgctttggatgttctaaagttgcacaatcactttggaaagcattttaacatcattttatgaaacgtacactagccttacaactaagcaatctcattcccaaagaaacaaagatatatgttcaaaaaagccttctatattcataaatgttcatcattgttcacaatagtccacaacaaaaataaccaaatgaatactcactggtaaatggctaagctaactgtaggacactcatacagggggagaagatattaaacattcagaaacacaaatgaataaataggtgccaagtcaaagaaaacacacataaaaatacattgtattattacatttctatgaaattctagacgaagcagatgaggtgactgaggaacagtggctggggaggaaatggttttgtgactattttacacactgtacacttaaaagaatgaattttggggcgagtgaaactgaacaatctggatataagatgagaaaacagaaatgaccatgagcataaacggctgttgcttgcatgtctggatcaagcacgcataacaagaacaaaggttatttcatcatccttcccctccagtctactggagacctagagctgagtcaaacagatcttgcattcatgtcaggccacctgctggggtctcactttcagaaaaaatacctccttaaagtccttcctcagaatctttctatcttgtctttttgggcacagccattattctagggaactctcaagtctctttgacagagcctgacttgtctagttttaatatttgtagagcttttaatatttgtagagtggtaggaaggaataatgtgtttcctgctcatcagatccctggccaatgctcaatagcaaaggattactaacatatataatagaagtaaacagtaagagctctacctgatgccagaacccttagaaatgaagaccaaaggacctggtgaaaacttgcccatgtgaattctctgtgatgagaaggaaatatgtgtagaaatatgactggataaagttttgatcttttgctcaatcagatataggagcaattgattcataggaatccttcggaatatagtgacaaagggaaattcaatgtagcctgtgaattctatgtagatttctctgtgtctctgtgtagcttgctttcctctgtgtattgggtgagactctacaggaacagcctgcaagggtgaagggaaaggataatgttctgggatttgtgggagagatgttctagttcctaggacccacttcagaagaaaataagggatgagagaccaaaggacagagggtcagagatggacttgctttccaggacttccaatcttcttcaatgctatgtacaacatgctgaagagtcgtactttggaatatcgttgtctgggtaccatcacaataaagaaacaaaagaaatagggatgggataagtgggtggggacatgtagtaaacactggggaaaaaataaaaggaatttgtatcaggaaactgaactgcattcaaatttgcaactgcaacgctgtgggagaccctgtgaacatcaatgtttggagatgaaccaactggtgcttatgtaaaggtgcaaatatgtagtttaattcaacactgaaaaagcctaaaagtctcatgacttttgctggatctttgggtttcaaagatcaggaggcacacaatgcttgtcctcagatgatccagcgaagaatattctagcaaatcttgcaagccagagattgtcataacggagctatatttaaaatgcaatggcaaccagataaaggagcagttaattcagctaagaatttcaatagtggccttccaagtgagaaagctgcgctggagtctttcaggtgagcgggcatgaaggacatgtcaagcagaaggcacggggacaagaatgtgggtgtggacatacagagcagagtcaactcaggagataagcatgatgtgagtgagtggcccgtgaaggagagaatggcatcttaaaggctggctagggtcagataaggactgtgcaattgtcttttatcctagcccacttggatgtcgagtgaaacagaccagtaagcatgatgggaaagctgcttcaaggccatgcacttactgagctcatgcacacttcttcctactggtgtaggctctggctgctcgaggcttacaactacttctcttctcggaatcattgttgtagtgagctttgttgcttggaaagctacttactactcttcttccacaagtattttgggcaaaccacagcccgtaatgggattatgggaggatgtagcaccagccccttcagtgttatgttgtaaacctttctggggccaaggcttggctttcacccaacttgtttccccttattctttgttctgcctgccctctttatttctacctgatttgaaaagaaccacaaacaccccagttttcgtcttaggccctgcttctagcagacctttctgaagacattgggacataaactgatcagaatttatgtttcagaatgggatcttggaatgatagaatgcagccagactttagcagaggggaaagtgtagggatagtagatgtcagggtacctgaaggcctgcgtcagggtcttcatcaggaagatggggtcaggagacttgatttcctctctggaggattcatcatagtgtatgtgaagcagagaaaaaacgtctaggctggtccttcaattctgagggtgacagcgtggtctccaacaccatttactgaagggacaaggaaaaagagcaagcccctctagaaggcaaagtccagaatgaattcagcccacagcttcttaaattgtgactttcccatgagatactacatggaaaacagtttgaaatcagattctagatcccaggtaacagggctagccagaaatgttgatctgggaggccccagcatttaaacaccaagtgaaaccatggccttgcctgggtgggagcggactgtgaatagcctctggagacctaaagcatggagagctgatgtaacaggaaaaagcagctggagagatctctgaaactccgagggaaagaggcaaacttgaaaacagctgcaatgccaagcaaggggaagggtgaagaagagatggctctgatattcagcatatcagggagcaaagtgggtaagagacaggaacagaccaaggtagcttatcacttagaggctatagatggttttgacgagtattgtaacccatgagctaagtagggaacatttgagtctgcaggggatgcaaagtgagatgggagaggccagatacttccaatctccagctttctaccttgtggtttttccttcctattaaatcctccaagctatttttactctcccccagcttctgtctgggttgtggaaagagtgaactgtcagaaagaggcatggtgaggagcaggcagccgtggtcctttcaaactgatctcagcccagcttccttcagacccatcactcagcaaacacctcagccagtccatacagagtcccaaggaggtcttcccctgccttgcacagacaagcctcccccactgcacacttagaatcggtcattctcttagtagatgctttgaagggatctaaaagtcacagacacagcaggacataaaaagtgtgtttcccagaggaatcacaggaagtcaacatttgtgagagaatggacgggaatgaagcatgcacggcctcccaaactgctttgtgtttaatttctccatttctttccaatctcctcctttccttttggtagctatttcttcatgtttgactaatttagtccttgattttatagtttctgctcccacatttacaatacgcagttttcatgttgggtaaacagttcaaagggtagatgggttttaccagtggactgggctcttgagcctcctcaggtctgcttggctcccataattccacagtctggcccactgccagaaggacctggtgctaccagggtagatttcttatagttttcattttgcgcctagcctttaatgtctgagcaatccctccagcctggttgatttcgtaatatctctgacttttcagcttcacaacaggaagagagccagtagaaatagggaatctatgtcatgcggcttctctcaaccagatgggccatggctagctaccataaaacttctagagaacctcacttgcaagacataggatctagcttttaacatctatgccaaatggccggaagacacaagctaaaaatgcaattatacagaggccctctggggcttgactttgacaagaaagaaatgaggatggagagaagccagcatccagcctctgctctgtatcccactgcagggagccacactgtttctccatgctttcttgtgaagttctgacccgctgagtaagtagcctgttgctttgactttgattcccctctttcttgtagtgcatccatccccccactttctacagaccatcctgaaagtatgccttccagtcaacccttgttacatttttacctcaggcttcttgttcctgaggatcccaggctaagtcagaggccgcggtttagaagagagttgattttaggacttaggaatggaatgactttggaaggccaagttcaaactcccacctgccagagaaaatgatgtgctgtactcttgaccatgtctaacatggggatgtccagttccacacctggaaatgcactcaggcatttgggacctaagtgtagtcccgggcattagagcaagaggcttttaaaggtaaaaaccacatcctggtgtctcactctgcagctgcaggaagagatctgtacaatcaggcagttgaactgctggataatgtagagagcaagccttgtgcacacagataaacactagagaatccaggaacgttaaacacacagctcacctcttcactggaaggaggtacacagctgctcttccaggaatgccaggaatcacgagttttacaacctggtgatccttggctatctgatgagacaggctccatccatatctcccagaatttatgtttttacttatccaagaccttttcccctaaatcttaaacattgtttttagaccataagactcactctatgagtgatgtcacttgcacaacagcctaagtgacttctatgttgtcttagggccaaaccaatcccgacacccacaggtgttatgtgtacctcaatcaaactccccagaccctaaatcttgggcactatctctgagtcaatagtacccattctcatgaaggaagccagatgtactttgttaggaatctcaatgtcaacatgtctaaattgttgtgtgcactagagactgagttcattgttacctgaatacttttttcaaaattgtgctgtgcttacatatggctaaagttaaatgatctgggccagactctagaagtcctggtccagcaccagctatgataaaatcagactgagctgagctttattcttatctctccctggattgtttttccctgcctgatgtaaagcctgcaggggaatcaccagaggataattttccatgggatgctccaccaaggacaacaaatggcctcagcgagaatacaagatgaaggaaccactgcactagtggtcttgccctgtcacactgggactgaaatctacatatttctttttcaaaattctaattagttccaatatctacactcataataattgtaggacattgtttagaactgaactcttgcactaaatagatccccaacagaccataccaaaccaaactggactgagtggtgttaaatgccactcagtcaaatcaaatgttcagctaggagagtccagaacaggccagtgcttgtgaaagagggagattccaatctgcttgtatcagtgtcatttgaaaatcctctctgctttagttgtcttaaaaaagaaactgggagattgtaagagctggagaagttttcctgtgaagcttcttctacatatgatgtggctagggctatcaacacatgacacacacacacacacacacacacacacacacacacacacagtaggaggggaaggctagttgggaagaaaagggtctgtagaagggagaagggatgagagagaatggtggggtgaacacgttatacatttgaaattgccaaaatgatattgaaagagtagtagaagataaactaagtagcaaatctgaccattggcctgtcctctagtgttctgtttctttgttttcaccttaacaacatgcaacattcatttttagcagggggaagcattctatgtattctgcagaatgaggctgctctgattagtaagccacaaatctaagtcatttagctctgtaactaaatccattgtaatttttccttttgacacttcctatactcgaatgtcaagctttagagaaaattgtgattccagggcacccatctgggaatcatagtcctggaaagagagactctgccatcattctattgctttcatctgtttgtacctattatttacaaaatggtattgtaaccaaaataaattcctttatttaattaactttcccagttaactgaaggataagtgctgctttgtcttcccaattggtttatctgcctccctgtgttccaaatgaagtttacttgccttgaatagaaggagggtgagccattatgtaatgcttctctagaaagtgtgcttcaagcttggttggtcactgaagcaccagagtcattttcctacagacactgcctgctcctctccatttactgtctaccttctttgttcatgaaatctgcctgattgttccattcctccagtcagtcattgtcttctttatttctgccacaagatctcacatagcccaggctgacctcagatttcctgtgtagccaaagatgaccttgaacccttaatcacagaagctgagatggattacaggctttcactaccatatctggtcatgctatatcattttagagtgctttgtttatgtcaaagttaagaacttcatgttcctgttttaccactatctttgatcattgtgatagagcctgtaatcttttaatttgtatatctaaaacagacaaggttatctaatactcccaattctcatttttaggtttgtatgtttaatttggaatacttgtagaagccaggagattagaaagaggccattggtagggatggggaagaaagattttaagggcaatagaacacatgatttgaaggagaaagaggaataaggattagggagttttaaaaggggagagggatggagagggagagcagaagaggcaaggggtaatagctaacactaaggatgtttgaaaaagccatacagatacctactattttataagcttcctaaaagtttaattgaagttatcctgtatagagtaatcttacagagttacgctacacaaagaggttcctttctgatgctataagttgccaaataaagggcccagtgccaactgtagggtacttcccctcaaatggttagccagggctatctcagagacctccccaaacaataaaactattgccattactctttatttttcatcagaaatagattaaaaaaataccacacacttggtcacaggacatagagaaatcagattggctttgaccaagaagctcccacccccccccaccccaattagctttcccagttctgggaggttctataaaggctgctggggaagaaaagtcctcaacagtctttaaccagctgtaaaacatctgtgagctacaatatgaaaacctggcaagtcagtccatgggcccaatagtggcacagatgttataaagctaaccaactggttcatgattggacgtaaggtctccttcacatgaggaagcacatttccgatcctttaaatttggtcaagaacctatagcagagaaccttctaggccccaacctactactgttattttgctacatggagatagaatcaaactgtcttcaaatttgcatttctaaattcagagatttcaacagttctcagatcttatcagagaagtccctatttgtagtggatagtggttaacacagaaactaactggtcaaagtgcagagaataagtgcctggggtaattcttagccatgaatgggacaattagatcatattctcttattgaccttcctagaagagggactaaaagatttaagaaccagaggtctgggaagactggagtgaggcactgccctctgacataactcaggaactcacagcttctgtggtgacctacacaagacctgcacaagatcaaacctatccatactccagcatggatctgggaggagctcataagccccaccccagctgaggagatatgacagttgatggcttctggaggaggaaaagtcagttttccttaagtgtgtggctcctggtaggttgaccatggtctttctagttgatggccccataattgtgagtatatagatagcagaaattgaactcagtgggttataaaaaaaaaaaaataggggacatgaagttaggaagagttgggaggtaaatttgcaaggagttagggagaggaggggaaggtatgttctaaatacattgtatgcatgcgtgaaattctcagggaattaataaaaatgtatttgaaaaaagaatatcaaagcatgtgggactgtttctctataaagttagggtgattattgctgaatgactaaagcgaagcacttggaaattacactatcttttctagactggtgaaagaaaacacattagcaatgttttggcattctcagttgtgtttgggtgagtgagctgaacaagactgtggcagcagtgctattccttaattctcctccttttccttttaattcctggctcccctttgttttcttgacatcaaagtcctttctcttctaaacagagctctttgactcctctcctggagctctgaagatggcctcagggccagaatatttgcatcacactcagatgcattacctatgcaacctggactgttttgaaaaagcatccttggatgcaggaacaatgccattcttattttcaatcttccttaaaaggcttaccttgacctagtattcaagactaaaatctgacagtttctgtctggtttttgcaaacaccaagtgaagagagacatcagtgcaggaagaggggggcttagtatttgaatttcattctctctctgtggggataatcttgggtcccttcatttacctttatcatgtgtgattcttgtaatgaatatacatctttcccaaataagaaacaaagcaacagttccacttaatactgataataaagttagaggctggactgctccaagataactttcattggattggtacaaggatgtctacttttgtggtctgataaaagttgaaaggtcttcctgaggaaaatgtactctttctcacccataatcacattttgagagtacaaattttcaactttaagaagaaccaagtttgttcgtcagcgttccattgctgtgacaaaacacttaacacaatcaacttacaagaaagaaaggtttgaagtttcagtccatagttccttgaacttattgggctttttttttttccagagaggatttctctgtgtagctttggagcctgtcctggcacttgctctgtagaccaggctggcctcgaactcacagtgatcctcctgcctctgtctccggactgctgggattaaaggcgtgcgccatagacacccggctgaccctattaatttttgcctaaagtatatcatgttaagatcatgtggcagaggaggccatttaccttacaactgttgatgtatacattcgtaattatagcacttaatgtgtggaccaagaattctaggccattctcaggtacatagtttcatgccagcctgggctacatgaaaccagtacccccaaaaatgtaaatgtaaattaaaagtacaaaataacctaaaaatgatttaggtcaccccaactatcagcacgtctatgtgctgaatttacttggacatcgatttggccagcaatgcagcaggttcctggaaggttttgaggaggtaggggcagggggaaatgtcaagattctcttccaggatagcgttaaatgaataaagttccatatgacaccataatggacccactggttgtcagatgcagcagctttggacacaaaatcagtgtctcggataacagagaacactagcttgcttcaccattttacctgcctcccattgctgaaaacaaaagcagctaccccatcaacttacttaaaaacaaacatcagggagcagaggccagactcgtaagagtcaaatgaaatgtttgcttccatttgaaatgggagcctaaatctagtcattatggtgtgtgttagagttgccccagatataccaaggaatttaaaacttggtagccctggctactatttaagattgtattcaagactggtgatgtagttacagagaagcctgaagccctctaacattttggacccttcaaacacatgcatacacactgggaaaacactatgctatttcaataatgtatctgatgtttactatctatagtgggtaaagctatttgctctggagttcgttagactaaatagcttcctttattgggtaactgtagcatgcacttaactgtcactcaacatgtgacatgtcacaaagtgtgtaatggttctctggcttccagtatgcagagacaaggagtgtgtgaaaatgtgtgttggttcactcttgttcgtttagcagccatttaaagagggataggaggaaatggttatccatctctgaacctgggtcagtggggagctgttttgctgtaatatctatggttagggatgggtggagtagtagatctgtgactatcctcctattctaaggtagaagggtggtggcagtaagtcatgacaaagttgccaaattaacgctcaattttgtcatctgcttagaatctcctcctgagacaaatcctctgtgtcccctttgagggaaacagtggacttgttggcaatcagcagtaggaggaagcaaatggagaagtccccagtccaccatttgccttttaagtagataacaaaactgctctcatagagttggcatctgtttagacctgtactggagaatacttttagagcaggggagtggactggggagcactatcattttactcccaactcccctcttcctctccaaatttccaccgacaagttcacctaaacaaccccagagactgagatacacagtctcaaaaccattacttcaggacagttctctccgttcaggagccaactttggaaaaaggccgagagactgctcaacccattgaaacattgctttcgcatctagtactgggtctctcaacctcacatacaaagctagcttcagctccatcttcctattccacctactacacaggactggaaagcgccaggacagagaatgcctgcataatatatcaaagttaacagaacttactaaagctttattcatcccttgtgcctactaacttaaccccctggatggcaccattcatggcttgagacttggttttactgctcagctgtccattctttgaatttataataactaaactcccttctcagagcacagctgcgggatgtgtgcataactctgcaaagtcacagggagcgtttattgccattattattgaagccgaggtatcaaaagctataaaatggaaacagtcgcactgtgaaacctcaggagcaaaatgctgaccaattaattcggtgcctgaaagctatggatgaaagctttttaatatgaaggaaaattaatccagctgggttccaagacactaagaagtgaaatgccaaaatattatggaaaaatgagcctttatctttgctagaactccagatgcatgagggacagtgtctttccataagcagagtattgttaagctgtgtactgctctgtggtagacctgctatggcagcgattttgacatgtctcatcttcatctgccttgccctgtcaagtttaccatatgccgtgagtgtcagaactgaaaaccaaaagacagatttagctccttctctgctacccagtctccccctatttgggccaggtcatttgaacgtgacacatcgactcctttagttagaaagctatgttcatagactagatctctctcatgcctctgtgtgagacagaaagtgctccatgagtatgtcttaaccatcaccttgccccctgcctcagtacactttgtggatgggaagatgacaaaggggggaggaagaaagaagccagagatgaaatgaagtccataggatgtctgaagtctgcagcaaaggcaggaagaagagctgtctcattctactctgttttctcctggcccaggtcatgctcagatctctgagaagctgtgcacagtactgaagacccaagaagtcattaccttcctgctagatgctcccctcggtgagatgaaggattggagacatggtagcagtgcctacattgtttataatttgctcccactgggattgcactttgacccaacctggttcagtccttatcgtgtttcacagtgtccccttctctggtgactagtggaagtggggatatggagaggctaaaagggtggacccaggctgccatcatgcttttcctcatagctccggagtgggtttccacccaaggcaggcaaggagcagaggctatgaggatgtggtcttgtgcctctgagggttaaagggcagggctgtgtgtgtcaggctacagagcagtctttctaacaacttagagccctaagaacagcaggacggaaacctagagatgagtccagccagtgtggataacttcttgaggccaagatgcatgtgacaagactggtcagaggagtagatagatggcagcactactgactcttgaatgcttgcagtgacactattttgtctgtcttggttttgtcactgtctatgaagaacaatactaaacttcagacttttctttttttttttaatattagccctctcctggacacttggatactgactggccttaggagctcacagtatagtgagacagacatggatgataaccaactcagtgtgacaacaggcacagcagagatctgagaggcagagacagcgatgactcagcaaatcctctctccttccttttaccttgagtaggctagccttttcctgtctgctgggtttcctggcaaggatgtctctgtcatttagaattctggccattagtctttcaaatacctcatcatcatcaagcagcctgagaaagctcagtaagcacagaattgactgtcacatctgattacagatgatgtcggggctggggggaggagcgtgctcctacaaggaagcacagaggaacatggagggggctgggaatccgtttccaccagagaattcgcctcagtctgctctccaacaactgaagccactcttgtgcccatctccctgtcttctttattcctggcagtgtctatatgaccttgggaaaagcgttttcttatgatttcagagactgagatgtgtgggaaagtgtgtttaaacaattttagaaaaataattagccacccttgagggaggggggggggctttggatatgaagaggcaaatggtgagagacatttgcctaggaaaggagatctggaaacttctcaggtggttctatttagccaagatttacagatgtgaaattgtcactagtgccagatccttatccccttccctggatcagaaaatgttaccactgtgccttcaagaaaagctcttaaacttgggaatgtccttctccaccactcttacctgcaattggcacctagggtttgaatttagtcaccctgaatctgagtcccatgtatgcatgccctcgacatgttatctgaatggctatttcctttactctctccattttcattgacaaaatgggggtaagaattatatctgtttttgcagggttgatcagataattcaagggcagaatctaagttttaaaacactgagaaaatgctcctttactcttctgatagagcatattcttgatatattcttaaagccatggcctctgcttttaggcaataggtctctagcctcaaagaaacctaggcttccaagaaatggttttaggcacacttaaagtataataatctccattgaagttgtgtttctaacacttatagattgccatggcgtaggttttaatcttgtgaagcaaaagtttctttttatacaaagagggacgactaataatatctcccccatatgtttttgggaagatgaagtgagctaatgtatgcaatttagcaagacattcaataaaatggccagtgttggtgtctgctgtgctggagaaaatggctctcctcaccatctgcagagacagttgccttgagcagtcaagttatgcagactgtcctctgcagagacttattggattgggactcgatgcagccacaaggataccaattaatttgttgtaaaaagaaagtctcctaagaaagatgagttagactaatcatttgcttttcttgaaatttggattgggaaaacacagagacaattagccgtcagcagtgcaataacaaaactgagaacgataaccaagtgcagtccagaccatgagggtgcatgacaaatttcaattatgaatcagcagaagctgtgactgtgagagacgatacggaaaatcggagctaagggcaacagaaagaagggaacagatcaaacatctgaaagtatttgagctccttccatgggtaaatacttgagaaaaaataggcaacaataaccatctatggcgccttcagagcatcctctggaagctgggcgtatctctgatttttattgcagtattgtttctcctaacatgcaatactctttcctccactcttcctgttcttgagctagtttataaacagcctaaagagttttaattgaaatatgtccacaatgagacaaaccccactaaatcaaagctgtcgttattgacttggaaattcttatgtcactggagtcaaaccattcaaaaagtaagtgggatgtgatcactgaaggagagctcaaaaggcccaggcttaaatatgtagtttgccagtttaaacacatgccagactctaagcagagtaggggcaatcagactcatgtcttcaacagaaacactaatcagaaacttcgatgttcagtgagtatttgttcacacagaagatgtcacctgtctgttcagaagaataaagtttaaaagtttcatgctggctccatttccttagttccatgtaagggtagagacaggaaaccccagctagagagactctttccagttactgtttccagttactctttccaattacagagcagagaggactctgcagtagaatacatatatacacaccaccaccacccccacctcccccatcccctccaccaccacccccacctcccccatcacctccatcaccacctcttgtaggggaagctgtagccaccgcctacttaggggctggctacaggtatgcctgaccacgcttgcgagggcgtggtcagggtgacatagagtgactgcgttttctctttcggtttctcttttttgtacttgctgaacagaccgctgccatgctggctggctaggtcgctctgtaagtaaggcttttccctattaaataccttatatttctacctgattccatattggtaatttcccaccaccacctccacctccaccaccacaagactattttctcagctccaattgaggctcatcaagcagtctttcaattgctatattggcattaccaggattcttatactgaaagatggtaccaagatagaggacagatgaatgtccaatggcagagaagaacacttcttgtgtgttagaatgtgggtgctcaagcttgagcacccttctgtatttaaggacacaaacactgtgacaggtagagtgagtctctgactagcaccaagtctccaggcctggaaaggctcagagaggagaggtttgggatgaacccagtaagagaatggttttctaagcagcacatttatagaagctgtacagcatagtgtggtataatcaacacacacacacacacacacacacacacactcacacctatgcatctatgcttatatacttgcacatacacacatatatatgttttatgtaatcttggttttctggtccagagtctcctgcatactgagtatctttcgtatattcctgaaatgactattggaagggacttcaagacaggggttggtcagcagaaaaactaagccataagtagaatgtggtgtcatattgtttatgatataataaagcttgcttgagatcagaatgcaaagctagttgaagccatagaggccaggcagtagtggtatacacatttttttttatgagacaaggtttccttgtgtagctttggagcctgccctgaaattagctcttatacttcaggctggtctcgaactcacagatatccaactgcctctgccgcccaaagctgggattaaaggcatgcactaccaccagtggtggtatatccctctaatcccagcaactacactagttagccatagaagccaggcagtggtggtgcatgcctttaatcccaacactagagaggtgtatctaacagaagcatgacctcagagctgtcattcagtcttaggcaaatagtctccagccatttgaggaaaggatcaccccagccttgctagagataagagctctctggtggcttggctgctttgcttctctggtcttccacttgaaccccaatatctgtctctgggcttttattatttgcattacattagagggttgggactttactctctcctttgcatcctgtatcttcaacagaaatctccattagaagatcccagtacgagtttaaagccactacaacaaagccagtactcattgcagattctccctaacttcccacttccaggcatggcactcccactgtgggcactaaaccctagagtgacccaggaccctggtagtcaatcaacaccgtgtgcgctcttctctatagacaaaggaatggctcagaattatgacaaagaacacagctttctccaaaacccactaggggaaaaagtagtgaagtgaccaaaggttccgcctcctctgaccaccaaacaccatctccttaggaatttctctctctttagctctgcagggtgacagtttcccctttaccatccattcccatttacaatatttctatggccagggtctaggaagacatcggtattatgcatgtgtgaagcagcccaattatttacattttgcatcttgtttatcgctccgtggcatccagcgcaggacaggtttggcccaacctgtcgcagcacagctccagctggcatcgctgtgattctgagctcagccgctggctgcctgttcattatgtactgcagtcacgccccagctgcgaactgcgtagggcagagattccctcctcagcatcctcccacgtcactgtgcacagagaagtggctctgtgatttgtcaaggccagcttctgccacctctggcggctccaggtacattatgcattctccacatgctggcgacttttctgtttctgtatgcagctggtcagaggtcattttctgaatgtggcaggaggccagggtgtgggcgctgagaaaggagatacatctcctgaatgcagaaattcaccgaaaattgttcacaggcacactccactgtgaggtggctgtcattagagattcccagtttcgtcagaaacgctggtgactgagatgctgaagacagtgtgtcttccagaagggtacagagaaagacagtagcctggctatttgctcagagggaaacagaaaaacagatcttgcaagctagtactctctcaaatgcaaatgaactccagtcccttggggagtattacatgttgtatctgtgtgtgtagaagttgaaaacatgtgacagggtgtgtgaaaaacaaagcctagagtcctcccaaatctccctacttcttacagatttttaactcgattcaaaaaataataatatctgacattcttacagataacgcaggatactctagtcctcctgcacctagccttggtgccaccagacacccacttttgtcctcatcctgaatcagggcactctgagtgttcagtcagaaaaaaaaatgagcacaaatgtccccagaatgtgactctgaagtctgtagctgttgttttaattttcccgtggaggacatgttatgttcaaggatagtaaagagtgaggtcctgtccttcactgggtggatgattagatgcattgtgaaatcatttcctctacattttcgtcaggtggactcattgtcctctttccccgacccccctccattctctcagtccttcttcctccatctccactcacgttctctccattccaccctactcctttctttccattatgaccagagaagaatcctagaactaggaagctgaacaagatggcagctggatataggttctctgtctttctgcctggccactgcatgactacccatttaaacctctccatcctgtggtttaacacaaaggctatatttttttattcaaatgcatcagtagcagctagccatactgagatgtgaggtgacctagagaccccgaggctaacaggggtttatacttggaaccaccatctcatcactccagactgtacagatgaggaggagtccgtgaagaactctgcaagatgtccatgccttgcccacatggtgatgtgggtcacaggtgtggggtttcccttcctctcactagtggctgggtggggaatgtgtgagggagacagagtcatgagtttccctggaaacagactccggagaccagcactgaggtgcagatctagtttaatgcgtgtgttcactggcatacatgcatacattatccaatctgctaaggacgtatcaagttactgtccaatgagttcaaatgacacacaaccctcattgagtgagggtgtgtgtgtgtgtgtgtgtgagtgtgtgagtgtgtgtgtgtgtgtgtgtgagtgtgtgtgtgtgtgtatgtgtgtgtaaggggcagtatgtccaggcagtgtgtctgcagacaaaggtcaggaagcagttgttggcagcaatttagagggtctacagttagctaggactccattatgagtcatctagtgtttcagagactcgggtcagttcaaacagccacagaaggtagtattggcgcttctcaagtcccctgtcttttagtgacgccatctgaatgtagcctagcccctcacatgtgaccagaacttgttctgtgactctgctgtaactcaagaggtccgaatgtgagcaacagatccagtaggccctgtggacagcagctactccaacatcatcactctctcaggtcctgcagcaagagtttgtttaccagttgctcaccagaaacctgtttgcaatagaagcgaaggtgttcggtgaaggcgataggaccaggagttgaacgccaattcttggctatgccatatcttgtctcaaaatgcttaaaaaaagaaaagatggaagttcagggtggaagaagggaaaataaaagaaagaagaagaaaggaaggggatgaaaaggaagcaagggttggggggaagagaggaaggagttaggtttaacaacgtggaaggcttgaatacttgtggactgcgcctgccaaggaaaggctgggtgtcatgatcaggattttgtctctttccccccatgtgttagtatatatatgaggatccattatttaatcttgactttgatttctctagctataagatgagaacaatagtatcaaccttataaagcttgtatgaggactaaaatttaaaaagagaatatagcatacctggcacataaataattcctgtcatcaaactatgcaggaaaatactgttgccatggaaggggctttgtattatgattctgaatgaaaaaacaaaaaggaggcttcagaactccttgcttaggatactaaatgtttgtagttgaaaaataaaaatatatgcataagaaaatctagaagatgctccaaaatggagccagacaatggtcaacctcagcgtatgctgttatggacctctggaaatagagcaatataattacaacacagcgtaactaaaggtagaccatgtgcacagcatgggacagatagcttataaattatgagccctctcctcctgtaattttatattctcatggcttttgggggaatctggaaatacattttcagcttcaggtataaaaacatgtcaagtttctttcccaaaaagctgccagtaagtgtgcattcttcctggaggccactggtgtatctccggatgtcaatgggaggtttgcatctgttttccctttatgtctgtactattgttctctaactctgctgctggtgaacagctactggagaccggccctttcactatgtcctcttctctctggcttcagagaatctcttgcctggagggatcaaacagaacccactcaggccgcctttgcagcatcactgtccccaccacccccatgcttctaaagctattgcctgaatgacatacaagcccaagtgcacaccattgtatgctatttcaatcttacttctgaaacatttttccaaagtaggctgtgctctgcagtttttataactacattaaaatgcacctctgtatgtttatataaaatcatatactaatgccctttgctgataattttagtatttttattgcatgaagatgatctatattcagtatgccactagtagtagttcagttgtaaatagctgtatgccggttgtagattatttgtatacgatttatgtgtaatgaacaacagttaaaaatggaatgttcatttgccattctgagaagagaagcacccataggagtttagttcttccaaccatgcctgacttccctaccagctctctgtagctttatctacaaaataataccaccttctgtgtccaacaggaagctgcacacactgactcctatttgctgtgcattttttatctgtgtctcttcactaccttggtgaatttttgcaacatctcttctcatgatcaatatcttatacttttgattgatcaagataaataataatctttgatcacaagaaagtcaccatttaaagatcagaaggaatcccacaaaagagtgtctagttccagtattctaggccaaaagaaaaaaaatgttcttttagtttttggtcatgtttgtctaggagaacactgacctaagtcatgttcagcacctttgaaaattagctatgtgaccttagtaaggttggctgctatctctgcttcttaatttggtattaaaactggaatcagatgctcaaggatgtggctccattggtagagtacttgcctagcaagtaaaaaaccctctgtttaatccccaacactgcataaaaccaaacatgttggcacatacttgtaatcccaacacttgggagatggatatgagagagagtctcaattttaacgttatccttagctgcatagaaagtttgagtccagctttgggctacatgtgatcctatcaaaagaaaaaatcatcatcattgttttagtcattgtagtaatagtagtaacagtaataaattgtatcattttacatgcatacaagtttttaagaataaacactgaaaatcagcttttagattttgcattgtaaaaccagaagttaatttacacaaaaacctttacattctaattattccacatatgtctatgtctcactgtgaaattattaataggtcttactgtgaaattaattagaagtctcctacaaaattcatgtgtgtgtttgtgtatgtgtgtgcatgtgtattatattttaaagatagaaaataatctgaaccccaagatgtagttagcctcatattggatgaaggataaacacttggctatcactcttctaaagatgagaaaactgagttacagagaaattaattcatccatggtcatatagctaagaggtcccaggataggctcacactcagtcagcatgactaagtgcattttgctttattaatcttttaatagccacaatgctacagctactacaaagacgagaacaaagcaacaattgctcctatttctactttacgttttctgcatttaatacagccttgcctcctgccaccttcacttaatgaccttgtggtgtataaggcatcatgctgcttactggagaaagcagtcccagttctgcaagatgaagacacatttgaaaaacacaatgaaaattacaataatcagtgattatggtcccttctccaaccaacggtgaacacagggcctcataattctgattaagtactctgccattaaatactgagctatgttcttcagtggttaattatagattttgatatcaagaaggtgaacagtgacagaaagtaataagttgaattgggcaaattagatagaaaaatgtaacccatggaaatcataattcatacactaagagatgagtcagttgtgtggtaagccagaagaagatagctgaggcagaaaaaggaaaaagctgggttttgttttgaaaacaaaacaaagtgcttcgtatcagagaaaacttaaaaaatctaataattgaaaaagtgagaggcctgactattccagggttttaagtgtgaatagagtttagattttcttctaagcaccatggacagccacagaagacctaggaatgagaagtggcatattcattattgtgcacagtgacgtcatcctagtctagttctttcttgtacagtgacagcagatggggcaatttagacaaattttccaaacagcagggaaaccaagcaatgagcccaaacacgagtcaatcattgttctaaagtgacctgtacttggcagaggtagtccactgaacagttctcatggcgtgtagcacaagtctccaagtctttcaaccctccctacaaatgacatttctgggacatgaaacattaccaggaatcctaaaacctcacagacaccctaggagaaggagaagaccctctaggactccatagattgcagccatgcttcagaccacttaattgcatttaatatagtcttgtctaggttggagagtttagccaagaactaaaaccagttaaacatagcatagatttggagacaaatcaaccagaaaatttaaatttagaaaagttaaagctgaaattttaaaaagtgatgaatgaccttctcagatcacccatggctgcctacagaaccatagaaaacaaaacagaacagcagagaatgggtctgcatctcagatgctcacacatggctatataatgagcagtagagcatggggtctggaagttgaacagaaagaacccctgagaaaagaacacaaggaaataaaaataactgatacacttacacatgcatgtgcacatactgcaaaagaatgagagtcagagcatagtgatgctaatctaatatatacagatatagttcacataatatatgtaaaaggtaaattatatctcatacattattcatatatattatatataaaattaaaattgatgggagacaaataactcagtaaccctcaagcaggacaaataaactcatgcatacacacatacacacaaacacatgcacatataaatgtgcaaaaacacacgcactgtgtgcatgatatagagaaactaagtcagaagatcatgactgccaatcccaagaaatagctatggagtacatggtcatttaaagtaaaagtcattaagatacattatgagcaatttcggttggtgtacttgaaaacaaataagagcactgaggtaatggatacatgtagaaggcgccagtgtcacagaagggacataaagggaaagagaaaactttgcgttccctataatggaatatatatgaacaaactattcattagtgagtttacaatttgtagacacaaaggcaatatgcaacttttaatttcattaatacccaagtttgcattaaaattactatttttgataactacaaaatatcatctacctacaaatgaattttgtaaaattagacaaatattttacgtaaagaactagattttgatgcaaacgtcagatgatctggataaattaaaagattcactagcttcttgtgattgaagactccatattttccaacattaattattcacaagttgatctacagttcagtgtaatcccaggtagttgctttccacatcttggtcaccttacttgaaaatttacaagaaaacacagagcataaatagccaaaacacaaatgaaagacaatttatgagaagttcttctatcagtaacaatatttattggagagaaatgtccaatttatcactgccatggagataggctaataaaccacagaacacagtaggggatcccagtgtagttttccttgtgcactgagacttaatttaggacaaagacaacattcactgactgtagtgggtgaacacctctccttaataaatggcacagggacagtcaactatccacagaaactttggcttcacatcaaaagacaatttcagacagaagtgttttagaaagtaatgtagagtttctttaggttctcgtgacaatgaaagcatttttaaactaaggtattaaaagaagaacgaggttgagtcttccaagttcttttaattgggcactgactgcatctagtgggttgtagaaaaagacatgaagttgggaaggggtggcttcataggaggtgaggtagaaaatgggagctggatacagtcatttttcattctgtgcacatatggaattctcaaaggtatgccttttaaagaagagtactgtaaaagagctggtgagacgtttagtgggcagagtcacttaccaccagcctgagacctgagcacccagaactcacataatggaaggaaataactgaatcttgcaagttatcctctgacctccatatgctgtggcatgtatttgtacacacacacacacacacacacacacacacacacacacacacacacacacacacacacacactgagcaagtaaatggaattttctttgaaagggagtgatggaaggtaagcccactaaatgtgaggtatcatacatgcctatctggatacttctgttgccataacaaaatatccaagactgggtaacttacagtgaaaagagattttgtttttgcttatagttatgaaggctggaaagcccaagtactagtgatgagtgccatgtgctggaacttttggtaaaaaccaaaataccaacagcagaaatggaagataaatctggtgtgtttgcaagagagaaaggaagtcaaattcacactgtaagtaacctgttcccaagagaaaagcatgcacccatgagaccccacctgttcccaagagaaaagcatgcacccatgagaccccgcccatacatcacaaatctcccgttaggttccactgctcagcactgccacgacagcaagcaaatttcagcactgagttttcagaagattaagaaagcatttgcaagccaattaaggtgctggttcctgaatatataaaggcaggcaaactaataagacaattcaagcatcccattaggaatttagagaagattctggatgggggaaaaaaaatcactgaagacattcaacaactggccaacaactatgtggtaagatgtcaatgttattactataggagaagtgtcaattaaaatcaccaggagaaaccagcttttttccccaaaaagaatggaatgctgggaagatggcttagaggttgagagagtacagaagatccaagtgtggttccacataatcatacacagacaaagctgcaccaacatagttaaaactaataaaagcaatttttaaaaataacaaagagtggaaagagcaccctgttggatgttggatatgggcttattggaagtatcgcacactgtggacaggaactaaatggtacaatcacttggaaaatgatatgctatatctcctagttaatatccacttagtcaatccattcttaggcattcactaagaagaaataagccaatatattgttgtgctgaataataagccaggcaatgttgtgctgaaactaccttggatcaaaactgcttgggtaaattactacccaacttcacttccagtgacttttctttgatgacataaaatcagccatataggacaatttacacgatggaaatgggtggctgctctagcctgtctgccttgagattcagttggtaagcatgtatcagtacacatagtctctctctctctctctctctctctctctctctctctctctctctctctgtctctctctctctctgtctgtctgtctctctgtctctgtctctgtctctctcatatatatatgatatatatatatatatatatatatgctctctgaattgtttcttataatatgccaacacagagagcatgtcctttaagaatcaaccagttgtcaatgggaatgctggatccaattaaaggaacacagtggggctacatcttatagcatggaaaactcccaggcatatgatttaacatcagtgataataacaggtgaacagtgaagtatcttctcctgtatgatttcatttacataaagctcaaaattagtcaagactgaaaaataatcataggaatgcaaattaaacagataaaagtttgggggagacaaggaaatgataaggatggctactagggatatgtttggaaatgcaaagggggtctatgattggcaggagggggtgtggagcatcggtagtgctgacaggaatctgtttttatatcttagctgtagctacatggctgtttgcatttcattaagctgaacagctggcattcagataattgtatataagggcggtagtcaatgatagtcatacctccgggaagagaattcacaagcacttttgtaaatgctctttgaagcatacttgaatgtggtgagcactgacgatgcatggacaaataaacagttgtagccagaacacaaagtaagattttaaagtaaaaccggtgcaaggaggtggtaatattggtttaaaaactagttaacctggcaatccaatcggtatgggtatgagactaatgaagtgtgcattttcttagtattgtaagtcacttccctttcttctctactatcaatcaaacccagcctctggagcactaaaaaaaaccatgaatgacaagcatattgattagtaataagggtaagcatcattcattcgtccctttatacttttcataggtgtttgcttagccttgctatatgccagattctagagaaagaagggactatttcaaggtattcacatgcaaatgtatatggagagcatcacagatatgcacatgccaatattagcaagtatgtggtgcaatggagaaaaacactagctaggagccacttggtagataaacaatgtgttagatattctgaactcaactacttgtctcagggttttattgctatgataaaacacccatagccaaaggcaacttggaggggaaagggttttaattcagcttatagttccacatcacagtccataattgagggaattttgggcaggaatttaaacagggcaagaacatggaggcagaaactgatgcagagaccgtggacaaatgcgcctacaaataggcttgctcctatgatttctagtagtgcccagggcctccagtccaggaatggcactgcctacagtgatctgggacctaccacaccaatcttcaatcaagaaaatgtatcatcgacttgcccaaagggcaatccaggaggaacatttttctcaattgaaattttttcttttaaggtaactcaaactatatcaagttgacataaaataagctagcccaccattgttcctccattccatgttagtactagtgagagatgttaaatagctaaaaattacacactcaagactactttcaagggccagtgctgagcagcacttgaacctgccatgtgtgataccctaggtttaagtcacagtgatgaaaaataaaggaaattattgccttgaggttgccttaacaatacttcgataaatactcccttgcaacaagagttctgagtgcaaatcattttctcagttaaaagcattcatgatatgtagaaagcaaaagcaagggagagccttgatctgaactcattgccattctattggtctgtgggaccaaggcagtgacagttttccctgccatagtgtctgttgtggttccaaggcactctgcaaagtacatgtgtcagcaatgcaattcccagtgccacagtcctgagaacttggagcttcaagtggtgactgggtcatggcacctctgccctgaaggattagccattggcatcactctaagatgagtgaggtctcatgggggtaggttcctggtcaaaagttgaacctgacctcttttcccttttcttttttttttttcttcttttctttttcttttttttttttgttttttttttgttttttttttggtttttcgagacagggtttctctgtgtagctttggagcctatcctggcactagctctggagaccaggctagcctcgaactcacagagatccacctgcctctgcctcccgagtgctgggattaaaggtgtgcaccaccaacgcccagctcttttcccttttctgaacatgtgctttccggccatctcttgctttctaccggggcatgatccagcctgaagctctcgccagctaccggctcctcaggcttagaatttccaggctccaaaattgtgtatttaacacatttattttcattttaaaagagccagcctccagcgtttcatcgcagggacacaaaattgaagagatctactactcaagttctttggtgtcaagaagtcactgagagagtaagtgttttttgatcaggttctctagtttgtagattgccactgtccctcaaccaatggaatatccagcagagctcccaaggtgtccttgtgagtaacaattctccgaatgggacagttgtgtccttttctataccttctggatcagctagcaccagtcccttcaacatttctgatgatgagttacaagctcccttcccctgtctgactctgttttgagtggcttctgccttctgcactgaaaagcagagcgagggtgcagatgagagtgtgagtcttcatctggttcgctggatgacaaaagtttagacttttcttgttataattggcattgagagcatgtacgattctaattagttcctctctttaggaatactttttttcaggagtctgtcagtgcaccaccaaaaacaaaatgaaaacacacacacaaaaaacatattttcttgccaacagtggaatttaaacactttctcgttctttgaaaatgtttttttttctttgacaaagatgcataaagatacatgctatgatagggaccatgcacgtataagaaatatcacgactcaaagggtgagttagcttaaaagcaagtaaagcatagcctgataggtcctcaagcttgtttcctaggatgcagtagcttaaacagataagtaagtagggcacctccactctcagcgcctttgttcaagggattttgagcatcagcaataggaattttcctcaaggaaatctattctttgaattcccaagagctaagagtaaagaaagcacatttgcaaatgctgattcaccagtgtggttccttgaaaactgcagtccccctgagcacaataagaaaccagccaggtagaattcactgcaaggttctaatcaggaaaagacatatctcaccagttaacaagagagtcattgtcttttgttctccatgcagctcccttagatgtggggagcccttttaatgtctgtttttccccatgggcagcattcaagaaaataagacggagagcttgcacgtagatctcagaatgtctcctgcccccagtgttacccaggagcaaacctcaagcaagtccccagattctctccagttcacacccagtgagcagatactaactcaggctatgtcagccctgcaagtaattgtgctttgttcatcactcactgaacccctgtgaattgtattcttctactgtcttcagctcacaggaagggaaatgttgctgaatcacaagaccaagagattagtcatgatgataaaccaaggcagttcctttaggataccagggtgctgtgctgggggaccagtgcacctaggacttgactatgcggcaagaggggcagctatagctcaggctcaaattctcttgtgatcacaaagttccaggaacatctagaaaccaaagactgccatttcccaaagaataggtgttttgacagaacgagatcaaggctccaactcatttgtttgctttaggaagtcaggctatgggttgcacaatatagatggtgaggtagactgtgttgcttccccaggttttctctgtggcatgtggtcccttgaggaagaaacagtgatgcacagaggtatacattcctgtgggtctacacacagtacaaaggcaggtttaacgagaacttccagcaaataccaaagcaaacaggcacaatgataacaacaaaccaccagttcaaatttaaagttcagctgtcatgtcagatgctttcctgttgctgggacaaaacatcatgaccaaggcaactcatgaaagaaagtattcaatttggaggctcacagttccagagggttagtgcccatgaccataatgtcatagagcatggcagcaagcaggcatggtgctggaacagcagttagaagtttgtttgctgggacaaaactcacagggaagaaagagctaagaatggtgtggccccatcccagtgacacaccttttctgattagaccacacctcctcatccttcccaaacagttccactacctggggactaagcattccaatgtatgcacttatgagattcattctcattcaaaccaccacatccagtgaatcctgtttgttaaaattctgctcacacctatctacatacaagtcttattagttacaaaatttttaaaaaaaattgtagaaaggattttaaaagttgagtaagttacttcaaacatcagcagtcaaactgggtctttccagggagcaatattttgttcactcaccgggaggtagaaaaaagaaaggtatatcagtccatacacacatcaaacagttgacttatccatttagtgtctatcattctaatatgagtcactgtgtagtccagaagtcaaatgtattgaagaatgggtaaaataaaaacttcatgaagaactttcaagtctattataacacttaacaaaccctaaatgctgttctaaatttcagctcttatttgatgattgtttttagtatcttcaagaatagtatgagattaaggccaatgtgtggtatgcttgcagcctaatatttggatccagttacttttctccctgtaacaaaaatacctgacagaaaacaactttaaaatgaggatttgttttagcttccactttgagaatgtgcagtccatcatgtgggaagggtgtggtggtgagagtttgcttgctcacatctgggaagatcacgtgactcattaggctttcttccttctcttttattccatctgggcccatgtttaatatgggcatttgctcctctgttaaatgtctctagaaagtgcaggcatgttcaaaggtgtgtccccttggtaattccaaatccagtcaagttggtaatgaagagcaacattggtccactgtctcacaaaggacaaggatactcttctgggctcctcattaaatttggggcctggcgctacagatgcttcagggtttagtatcactgggattctctgggctatggattcttatctattatgacagaaacagtctgaatgtgactgttaagcatccttctctgtctataaaagaattgtattttatgtcactggagagggaggaggactccagagtcagtggctgagccaagagtcatttggtttatgggcagaggtaatagaaccccattgtaatgactgaacatttgtgttcctccaaaatccctagattaaattttcaactcccccattgggcagtattaagagatggagaccttggaatgtgattaggtactgagggtcctaaggatgacatgagttccctgatgagatagtatatgagatcttgctctctgctctcaccacatgaagaaacaaagcagtggctatctataaataagaaagtaccctcaccagacaccagatcttctgatagtatgatcatggactgctggggcccccaaacaattagaaatgaatgttcatctattctgtgagagcaacctaccaccttagcattcctaaaacaaagattgcagtactcaacaagatgtcattgcccttatgagttttccctcgatcctctagggtgtacacagggcctatttcctattgtgcactggacagagcttcaaatagagctgtgtaagggtaggtttgagaagaggattctctgagcttgagttgtctttgaggcaaggttggaggacagttttgtttattccaagtcacggctcttgtttgcccctgtgatagtttcaatgagaaatgagaaatgtcctcataggttcatgtgtctgaactcttgcttttcagctgatagcactgtttggggaggttatgaaacctttaggagatagagctctactgggggaagtacatcgctgaggctgggctataaggttttattgcattgcctaattcctactctcctactccccccttttctttctgcttcctgtgtatgtgatcagtgagatttctgctcctgtagctgcccctgttgtgatagatggcatccctctgtaactgaaagacaaaataaaccctgtctgtcctatgctggttttggttggactattgaatcactacaacagaaaaggagctagaccattactggatcagaagaccctgcagtgcaccatcctctcctagagggataagcaattattatttactctggagccagtcacgtcccctgcaggcagtccccacccaaaaactgtcagattactatgacaagtacattacagaagatcactagtcttcacaatgaccttgggcatagaaagatcattattttgatgcaaactacaacctttgtttttaccagtcaagcaactctacttctcctcatagtcgggaagtagggtcttcaggaacccacccagagaaagactgttgctgacatgagacttcacatgaccaagtggatctattctattctcgcatggtggcaaccctcagctgtagatacaggtgagattctggaccccagatctcaaccaagttctaagtctgttcagtaggaaaggagatagagcttggtagccatatctaccaccatgtgaaggaacatggtttgaaatagaagattaaaggatgacagagaaaaattggaagatgtgagatttattgactgccttcacattgtagattatagttcttgggcttgagtgtactctgcttctcctatagtttgattatacaatatctgtttatatcttctaagacaataaataaatagtttgggtgaaatcttgttcactctaagccaagaacatagtctaaaatggaatctataacttactgggcttgcccaactctaccatagaatgaggaggaagactctgctcagcatccagaagaagaccctgctcagcacccacaagaggaagaccctgttcagcacccagactgtcaacagtttagagaacatggatgtgactctgatggccaggtagtggttgtgaagaacccaggagagggcatccaaacacatcagaatagagctctatctccttggaaagaaaaataagaggctcccagttgacaaacggtaggagatagaaaggaataggctgccattcctactacctgcagtcatgaccagagctcaatcaggagtgtcactttggactttcattaagtctgtgtatgctcatgtccccatcaacatcattattcaggagaatcagtcttgttgaaaattgaaatgtcttgggtgaaaaatatgtcttcagggtttagatgaggccaggtattgcttgttctgtatttcaagcccagaaagatgagttaatccttgaaataaatgacactgaacttattcaaattcaactgcttttattcagccagccatgggttttaaaaagaaggatagccaaatacttggagataatatttctgtctctgaaaaaggaacagctcagtgggtggataaataactaagaactgcccagatacagaaacaagagcctgaatgataaagacagattgtgatagtgtgtgtgtgtatatgtgttcatatataagccagagggcaatctggaatgttattcctcaagcattgtttatgttttttatttttgtttttaaagttttttgatatagagtctctcattggcctggaacttaccaagtaggctaggttgactggcctgaaaactgcctgtccctatggttaggattcagatgttatgctagcctgccccctgtcacctgacaggatgccctcaggcagtaccctggccagcccagggtcctatggctgctatatcattgcacagtctgcactcagatgtaaaggtttctttaagatgcaaactccacccatctcttctctctctctctctctctctttctctctctctctctctctctctctgtgccatctctctgaggaggtagacagatctctgtctctctgtcccttttctctctctgtttctccctcttctctccctcctctctcccttcccccactcctttcccttcccaataaagcttccttccttccttccttccttccttccttccttccttcctatataagttctgcctgatggcatgtttgtcccctctcccccaatggaactcatctcagtcctacctcacatcatattcctaacacctatttctccagaactgggattacaagcacaccatgatgcctgacagtttaaaaacaatatagagtctggagatcctatgttgataaagacagattgcgatagtgtgtgtgtgtatgtgttcatccacacacaaatccacgtcctcatgttttcaagggaaatgcctcacacaccgagccagttactcagctcccagtttgtgaaatctttatgatccagtaaaaaaaagttgccaaaaagtatttaaaaatcttcccacccagccgggcgttggtggcgcacacttttaatcccagcactcgggaggcagaggcaggcggatctctgtgagttcaagaccagcctgatcgctagagcgagtgccaggataggctcgaaagctacacagagaaaccatgtctcggaaaaaaaaaatcttccaaccctcctttttggataagtgagattgtagtatataactctgggggtgcttgggattaccttctgataaaacaaacaaatacaggtaccatgaaggctgcaggaagggtttaaaatgtgttcttttactgtaaagtggtggtggtggtttctagtgaagtgttaggtttgtacctggaaaatgacaaacatcttaacaaattttaatttaatttttattttcttacattttattttttattgtatatgtatatgtgtgtgattcacatgatgagacagcgtgtgtgtgtgtgtgtgtggggggggagacaattagttctcttcttccatcatacaaattctggagatagaactcatgtggccagggctggtggcaagtgctgcctaaaccattttgctcctccactgttggaatttctaattttcaactggcagaaggcaccaactagacagtggagtgaaatgacatggaatttcctttcacgtctccatcattttctatctttctattctgactccccttgatttggaaaaacaaaaactcttcctaattgaatcccagctttgttctagacatggttggatacatcccatttatcatttctcttgactttaacaaaaatgttagaagctggaactcacgattcctcacttggccagctccacgagcaattgtcaggttgtagccaggaagtaaactcaaatgtaacaaatgtcttgctcaggctctttctaccacagctgtaattctacctgattgattagtttttacttctcaaaatacttgaacaatcagcagggtcttctcagaagttctgtgggctgaatgatgtgtatgcaaaatattatcactgcttccagtaaagcctgggaggatttctcactgcagaattaaatggaaaatgagattatctgagatagtagccccactctgggcaaactcagacacagctctttactgaagatgtttcaagaattccaggcttcaaattctttttctttttcttcttgtttctgttttgttttagagccaatcaatatttattgattgaatgagtgaatcattacatcaataatttaaataatgtttcttttgtctacgatcttatatagtaggatgattttgaaatcacacactctttttgctaccaaatttctaaggggaaaaaaattactgaataaaaacaagacagaaacaaatatataaaaacaagaaccatgacaatttcaaactttctgattcaacaaatcagtagaatttccagttaaattcacaggatttgttatatgctagtctgttactttttttttttttttttttttttttttttttttttactgctgtgttatatgtcctgcttccaaaagtggtctggaaacttgcaaactggggccctatcacatcttttgtttctgatcgcatcatctcataattgactaccatagtcacagccaatttgtcattccgttccctgaagtcactaatgtaagaaagatctttcaataagaatccatcattttgaaatcttggcaatggatttgctaggttggtgccaacagcttatctccaactttagtctctagtctttttcatttttatcagaatgaagaggtcactgtatcaatattgatttcttatccctggatcttacactccttctatcttaatatcacatgctctcttacacctgttcatggatttaccattttaccctgtgatttacctcagttttcctccatgcaagatcctgtaacagtgttctgtatagtctagagacttagctatgatagtcctgtgatggggaaagtacttctgtgtatgtttatcttattgattgttgaataaaatactgtttggccaatggcagcaagttagacaggactaggagtcaaagaggattctgggaaatgtagtagagaagtggtgatccaggccagaaatgacatagcaaggagactcatatttagcaaggaagtgttgcccccttttcccctttctcctccagcggcgccatgtgagccaccagcaagagagggtgccagcaaaaggcatcctctataagataagtcttataaaatatataggtttatgataattaagactgagctaacagatgaggaatcctagtcattggccaagcagcatttgaacctaatacaaatctcgctgtgcattaatttgggccctaactcgggtgggcggctggtgtaaagtgcacatgtggcgatggggctcaggcagcttttggcaggaagatttattgttaacagtcctgcttacacttttaaatgagttcaggtaaacagaaagccaaagcaaaagaatagatactagataaatagatagatagatagatagatagatagatagataggatagagagatgatagatagagatgatagatgatgtagacagacagatagataatatagatggattgatagaaacatagatatagagagatgatagatagatatgataaatgatagacagatgacagatagatggatagttggatagatggatagatagatagatagatagatagatagatagatagatagatagatataaaaaaaaacatcatcagtcaggtgctccaaacacttagcagaaatctcatgggaagtcccattgagacagcttatagcagcccagttgaactctctctccatggacgagcttccaatggctgaaattctggcttctctttctctctgtagacacctttatattatgagataaactagagtaacctgttttagagataattcaatttctagatgttctcaaggatacaacacatttacttgggttttgtttgtttttgttttgtttttgttttgtttttctcttctccccttgccatggagttaggggaccattcagataagaagcattggaggacacactttgaaacaagcattctagagtttgaaatgggggaagggacaattctacttcccaagccagcttctcagtgagcttaaatagcacatgacagtttaccagtagagtatacattacaagcacactattcaaattctcacagatgctaagagggtggattgcggagtcagtcaatctaatctaaatattttatcatctcttataagcctcatgacccagtttgttacttactctctccatgtctgtttcctcctctgcatgcaggctcaacatcagtactgaataactgaaagcatttgctaaatgttgtggttttgttagctcttctgtgtgattgcttttgttatcctgtgttttccttttactcttctttgtcttcttgttatttcccatgctgggctcagtgttgcatctgctgtcttctatttatcttctctcatggaccggcattgtgcttgcattttcctctgttatgtgctactattgtcttctctaatgtcatggtcccctgcatgtctctggaactctgtgcaatgccctgacttctggtaatgctccacctgctgaatcctgtttgtgttttagttactgtggcttccccttagcatctgagggatagtcttagttgttaattgcattggcaatgtgctggggtgttgggttgtatattgagcttgacattgaaatatatggttctgatgcctttaactggatgtgctggatttagaaaacttgcttacttaggtgtcctgtgcaaatcctttgacttccataaggattaaatgagataatatatgtgaaggattctttgtaaactaggaagtaccacatataacttggttattgatctcttgaaatgtatcattcttttggagaaaagaatatcctcctaggaaaagccaccagaaaggtcatgtttctaagaaaaagaaacacattccttcttcattcacaggcttcacatgacccaattttaaagtgttttaaaactcttggagaactcgtttgtactttctagtttaaagagtattaacagcgtcctcctgggaccaacacaagtgtgcctcaagccctcttccatttgcctattcatgcaaagttattaccctgatgtctttagtgcacttcaatatttatatatctctctttgagatacgaggatacaaaaagatccatattaacttgtattcatttcacttgtaatatgtatttatcatggataatgcatagctgtcatttatctttgctctttaggttagatataaagttttcttgaatgataactatttaattagtattacctagtgttagtgcacattttgcagttaactgtaaaacacagttaatggtgacatcttgtattatgcatgattctaagtgctttatataaattcacctaaaatttgatgaagtggttttaaaacattcttatctactcatagaatttcagaagaattatatctaagtaagataaactaataaaataacaattggtagaatgttttcctagcattgctaagatcctggggtcaattgtttgcaccacaaatacaaaataaaaccattaattatacatacatatatgtgcataatcattatgttactgaaaataaattctaataatatgaatgacttctaaattctgatcgaaatggaagacagaaggcagagagatttctgtgggcaaagggaaaaactgttgacctatgttttcatatgaaaatatcttttaaaattaaggtaattattggtggaaatgaatagtataatcacattggaagacaatttcatggctccttataagtcccacatactgtcaccaaaaggtctggccattggcactccttgatatttatctgtgagttgaagcatgtgtccccatgaaaatatgcccatgtatttccagagcagtttcacttagtattgggaaggtgaattcgtaatggcagaacatccacagagtgggaaaataacttgagataaaaggaaatgagcatgaggactagcttagtgattcagcacatgcttagaacgcacaagaccctgaactcaatacctaaagtcctacagagggagttggggagaactataatgctgcaaatagacacctaggaaacttaggtgcatattttaagtgaaagaagcccatctataaaggtcttatattgtattcattagtcagagttctccagaaaaaacaaacaaacaaacaaacaaaaacagcctctatggtatatgtgtagagattaattatagtaaatccagtcatctgagtatggaggctgagaagtttaacagaacttctttaacagaagttatcctctttcaacaagctgggagagccagtggtatgattctacccaacattcaagactggagagaggagacttacatcctacttgaagacagaccagctaaggcagagaactactccttgcttagtcttctgtctttctccaggcctttaacacttcaaatgaagtccagaaaagcacccagaagcacctcccagatatagccaaagtaatgtccaaccaggtgtctggcaccatgtaaccagaccaagttgacacatgggataccatgtgattctaactatatggaaaagcaaaccatgataatattaaaaagatcagggttttcaggattcttggggatggagaaaaagatacaacatggttttctaggttttgtttttaagcctggcaaaaccattctacatggtgctatgattagtgtttatgatttgtatttgccaaagtctatacattgtacaacctccaaaggtgaattctaatgtaaactctaaactttaattattaatattatatcagtattgttttcccaactgtaaaaaaacatgctaaactaatgtaaaaagttaataatagagaaatggaggagaaagcaaagtttatgggacaacctgcagtttgtgtgtgaagctgtctttgcggggctgcagtcagagccagctgagcagccccaggttcatgcctgagtgggggagtatggatgagggaaaagctagctagaagagttaagaaccagagacacaggatggacacaggagggcagattcaacccatactaaatgtgcccctatttattcatataccatcttactattctaccaacagtgaggacaaaaggcagtgacttctattatcatgtacaaagggcaaagagacttatttcccttaatcctctaggtatttggtagccacaactgtcatccagccttcagggttgagagtaaatgcacctgggccaaagctattgttatttagataagagacattcatagccactaagctagtgtcttatgtacaataagacagatttgagctctctgaactcgtggcaagatggaatggactccttttcatgggtcccgacaattttgtggggggcttattttatctattttttttatttttttggtcctcatacatgctagacaggcaccttaccactgaggtatcattccagtcctctatttttgttttattttgaggcaaagtctcaatacattgagacattgactcaatacattgagactcaatacatcaatcctgacctagtttggtcaggaactcactgtgtagccctggcaggtcttgaatttgagattttcctgcctcagctttccaaatcgctggtattacaggagtgtgccagtggatcctcccaaaacattttcaggttggaaaaaaaaaagctaaagttcttcatgtttaacagaaaatgtcaccaaatatatatgctggtgttcataagcatggtgaagggaccagctccccattttggcagccatgacagccaaacacgtgcttgtctgaccttatcttggtcactaaggtcagatgcctgccccttttggcagccatgacagtaacatgtgcttgcgctgaccttgccttggtcactaggaggttagatgcctgcctcgtggcaagaaaccaatcagaagttagctggtggtgctatgctttatggctctgggtgtgctttatggacaaatgcacagcaatgatgcacagagcacagcaatcaccctgggagggcctatgggccataacaaccagttgaccaattaacacagggcaaaccctccaagcctggaggcacaccaatcctgagcctgtgggtacccctagacactccccttacattgccctataagatctctatgcagatgctttgagctgtctttcctagccatctgccatggcaggtggatgaaagacccgagctaacatggggttagtttgttaaacaactacaataaagccccttacagtttgcatcaagtttctgcctctgcatggtgattggggtggccatggtcctgggctgagatcctgggggcctgagcctccgggggtctttcagctatagatgtccaggacaagatgctctcatgcttttagcttgaatgctgttgtgtatcccaagggcactgcaacagctgaaggtagagaaaataaaacgacacacagatctgtttaacaactctctcctgcagccatgagagaccctcaccccttggtttccagaacaggctagactgaattactctaaattcagagatcaacagtggaaattgttttatctaaattatttttcttttacaacttacactctactggtgaaatctcataaattcaacttagttaggataaatggactttttaaatgataaattataaattattgactacttttgaaaaattaatttgcatttttctctcatattaactagccttagggtggcattatgttgactaacaaactcattgacgagcagttaaaataaaggagacaataatcttttacatttattcacattgaaagacccccagagactcaggcccccaggatctcagcccaggaccgaggtcaccctaatcaccatgcggaggcagaaacttgatgcaaactgcatgaggctttattgtagttgtttaatgagctaaccccatgttagctcgggcctttcatccacccaccatggagggtggctaggaaagacgacacaaagccactgcatagagatcttacagggcagcgtaaggggagtgtctggggtacccacaggctcaggattggtgtgcctccaggcttggagggtttgccttgtgatgattggtcaactggttgttatggcccataggccctcccagggtggttgctatgctctgtgcatcattgctgtgcacttgtccctaaagcacacccagagtcctaaagcatagcaccaccagttaacttctgattggttccttgccacgaggcaggcatctgacctcctagtgaccaagacaaggtcaggcaaacatgtgtttggctgttatggctgctgaaatggggagctggtcccttcacagccagtgagggagagggaggggaggtggggactgggactgtaagggatgtggtggtgtatgcagggactcacatatgagtgcaacccagtgtctgtgaagttgtgaacagagtgggggagccagctcgtgttttcacagggtccctttggcctctatgctgagaacggcaggtgggtcagcaaaggctgacctggtccatttcttctgctgcgtgtgctttctccagatacctacttctccagcccattgttgtcagggcttggttctaagttcttcagtttcaaataaatatttgctcagaccctcttcactaaaaaaaggttggtattctctagcattttatctagctccccccacactagattccatggtagtagagatgctaagttttgggggagttgtactatcttagtttttcatgtttcctacattactgcattgggtttacacatctggtaccactttttttaccttttgttttgttttgttttttgtttttttaattgtctatggttttatccattgaagtatctcccatattcattgaatgtgttgcatatgtagtttgggaaaataattcctcacactaaaagctgttagtatttggtgtaagctctatgctattccctgagtaatatgaactgggacagcaacggctatttgatattgaaaggccaggataaagaagaccccctcagcagacaaaataaggcctaggatatagggtggctagccggttcatcaactctgttccaggaaaaggctaaccataaaacattagattagaatcttacaaacgatcttaaggaacagggagtttccccttgtgatttccatcaggaccttccacgggtattcttggtattttgggttgtggattcttcctttaaaaactcctattcccagccattcggggtcgaaactcctctatccctgtgtgggtatgagtctcggctccagcacgctgattcctgtcaataaacctcgtgtgattgcagcaaggatggtctctcgtgagttctggggggtggggggtggggggggtggggggggtggcatcatcccgagacttgagtgagggtctcccctctccgggggtcttcaatatcaccactgtgcaattgccacagtagccaattagtagccatggccccttggacttcaacacctgtcaaaggataaataaccaaggatagtgtggattatacttagatattagttaatgaaattacaagtgagaaagaagtagggtgggtaaggattgaaaggtgatcatctcaaatccctcaggttccccatagtgctgtgtagcagagaggaaaacggcatttgtcttcatagcctccataaccttggggttctctggggctgatggggtaggagacctggtccctgttgtgttttctggtcagtggagtgggagcagccaggaggatggggcttccagcagcctggccaataaaggggcaggatgtctttgtggttggccaatgtgggggcgggacttcttcatagttagcctctcctgagccaggggttaagtgggaaaaaaatgagaagccctgaagtgttctacttattaagactgaagcctgcctgtgttccagcttcttggactattttaacataggctatggagctatcatgcttactgtgcctcatatgtcacagcatcgcgctattctgatgagactgaaagcttctctacagtctaacaagatgtcccttgctcagagacttcctttgatttacgaattccttgactgagtctgttacttcacagtcatgagttaaaaacatctggggtgaagctagagcttcaaggacaaaccaaacaccctagttcctggccctcaaaatcagtattagcatggaattttggtaatgtccataatttctctagaatttgaaggcctgggacctcaaagatcaatctttccagtggtaagtttgaaaggttacatcatatgtttgtaagaaataaaatggaaaaaccaaagctcttgggagatggtcagttctgtaaattgcttttcagtgaagcatgagaacctgtgtcactgtgaatacctgcccaagatgccaggcctaacagtgtgtgcctacagtcctagggcttggaagtggagaccggaggatcctggagctcaccggccagcctatctagccagactgtgacatctaggttcgactggagacccagtctccaaaaataaataaataaataaataaataaataaataaatgtgcctaatgtctgttatacacacacacacacacacacacacacacacacacacacacacacacgtatacacacatgcatacatatatacacactaaggaaaaactagctgggcataatgacctaggcctttaattctgatactcaggaagctgagacaagaggatcatgaatttaagaccagttacatatcaagatactgtctctaaagcccaaaagatgaagcaagatgaaaggttccctcgtagcacacattcaaagctttgagatttttcgtattaaatactgtctgcaagagtatgggctgactgtcaattctgagcattggggccctccaaagccctccccaagctgtgggcctctcagacaccaattccattctctggattctgatttaattttctgccaggtttgatgtgaacttcaataataacatttacatccttcttgtgaagtcatgctctgcctggttgaaactctgctcagattttgattaattttagccttcatttattctgtgtactctcatggtggaattacttatatctgggggccccagtgctaagactgtcagtacaaccaatgggtgtccccagagccctggaatggagcactgctttcccatggcctgttcctcaagggctgtatttgtcatcagaggtagaaaattctctaccagatttatacacaagtgatccctaggtcctgaagaaggcagtgagttcggtaaatcttgagaaaacacaacacacatttctaccacagagtcgtaaatatcctcaatacttccggcttagtaacaacattgcctacttattgggaaaattcacagcttctctctcttaagacctcttcttgttggtagaaaacatggctcaccagttattagtgtccagtaatcaaagtcataaaatcctatattccatttaatatcaaaagagatgtgtttatggactggggagatggtgcagaaggtgatagcacttgcgttccaggtacaagtatccaagttcaaatctctaccacccaagtaaaaactgtgcatggctgtgtatgcctgtaagcccagcattatattattatcattaatattaattaaatagtattaattgtattacattcttattacaaataaatgtatgtgaagagacagagagacacctcatttcctgctctgacgtctgcatgtacctgtacattcgtgcatgtgtagcgcacacatgcaaaatacacaccacacacaaatacatacatttgaaaagaggagtatttgtcttagatgtagaagttgaggtcaagtgttctgaatgttataggatctcagtaattctcccatgtgtcagacacttgattagaagtacaaatgaaacagagctgaagaaagcttccttcctgtaaatgggtcacacattaatcatcctgagtggtaagcttcaatcctagacaaattacttctccccatgcagtctaagggcacactcacatcaggctccaaccgcagtgtgctccatccaattagtttagggaactagcctctgcctccacttctcctttagagatcttttggcttattacacattccacttatattacatgtcatcaaagattgaaacacgagctttggtgacttccactttcataataagtaggcgactttagatcagaccaattctcacttaaccatgactgtattttatgttaccctatagggatcatctatgatgcctgacagtttaactcaaactttggcctttgttcagtggttaggagtgagcatactgctcactgttatataccctgtctctaagtgcttatagattcaggacttctaagcctggcactgagaaatacaattgccctttcataagcagggacactgaggtcacaaaagaagaggagccagcagcacactaatggactagtccctggcgagaattgcctggagaaaattcccctggagaaagagatagctgaaggtgtttccacaagtataatacaacatctgcatttccagaagtataatacaacatctgcatttccagaagtataatacaacacctgcattttaagttgtcacctttcctattgcctactcatcttgcaccaccgtatgatttacctgagacctgaaacatgaaagaacattctagttggtgcagtcttgtgtcagtgtatgaagaaaacttaagagatgagcaataagggaaggtgtggttctgtctgtgtctatctgccaagcctctacacatctcctaaagccatggagtcctggaacactagagattcaagcggggtggcctatccatcctttatgcagaatcaaaagatgtcaagtatagaagggacccatggaatgggaccaatcagccataaatggaaagtcctttaggttagagataggctaagtctgatgttattttagctgtggaaggtattgtgaagtgttcttggtacctataacactataacaatactgcttgagacttactcaccaaaataaactcttttggaccaacttgtctcagggttactaaggtattatgtttaccttttattattaacttgatataacctagaataactgggaaaaatctaaatgacagattatcaatatcaggttggcctgtgtgcatgactttagggggtgtgtctcaattaagtcaatttgatgtgaaaagacccagcccattgtatgtggcatcactttctaggcagtgggtgctcaactatatgagaatggagaaattgagctacacaggcaatcaaaacagatgagcatatatgcatccatttcttccttattttgattgaggatatgatgtgagtagttgtttaaagttcttgccttgacttctccaaaatgatgggttgtaacatggaattgtgtgcagatataaacctttctcctctaagttgtttttttttttaaatcagtgctttatcacagcaacagaaatgaaactagaacacaagaatattggcttttgctcttttctatctgacagataagactgtgtgtatctataacaggtgacctgatatttaaacagctattcttttttttcctgtgacagaaaagattggatggaactagagtggcatgatcagtgagaaaaatctcccattttcatctgccatcactctttgagagtcatgcacctcccattcacaccacctaaagtctaaaggaagctggctttgtataattaagtcagcaaatcctactcactcaccagtgtctgaatttctagaagaacaattatttgttagttacgtatagggatctacaggttatcaaatggaacttatagggatgtgctcactgaaccatcacacatagatctccaagtagatcccagcatgacataccactaccaagtaattctcatcctactgagggcagtaagggaggggcctgggtctcaaattccataggccaatctcaaaaaaggaagtctcccagggaaagaggacaaatgactgaaccacacatttgctacttccctcagagtactttcctctctcctggcagagagtagacactgctgccaagaaaataggggcatctttttgggaaatggagacagtatccatttcattggcacaaaccagtgatggccctattggaagatgattttattctgtgctcttcagcagcagcattgccaggattacagggcaaccccaccttattaaatgaccatcactgcacaattttgttgtgggagatctgaactattcctagttacttgcatcttttcccacctttattgtttagtaaccactcttacttttaaaatctgtgcttatggagtctccatggtagaacagtggaagacacagtgactttggaaatcgatttgagtttaaaagctactgtcagtcatatgaggtgctttggagagatggtgtgtctgattttctcatcagtggaagttagagagcagatgcccccttctcagagaatgagtgccagttctgggagaggatcaatttgaaagttccatgtatacagtcaggtcttcatcaatgctcatctccaatactatccacctcttctaagtttctttcagaaacattatttggccttggtctctatgaacaaagcctaggtcatggtaactatgtcatgctattccttctggaaagtcaagctttattggagcctatggtgggaaattatcaatatggagtcaggtagaaatataagggtatttaatagggaaaagccttatttgcagagcaacctagccagccggcatggtgaaaggggtgaaaactgaaagcggaaacccagccaactgaaactcttcctctacatcaccatgaccatgccctcacaggcatggtcaggcagacctgtagccagcccctaagcaggtgtggctacaggttcccctacaattccccttttagtctaaaagaggattaaaacttaacagtgtaaagtatccaaaattaacaatcataaaggtgaaatataagaagacacaataatctgcttatgtcacatcctaattatctattttaactaaaccctaaagtcatctgaaagaagtgtccaagcctgaacacctccttccaatcccaaccataaacaataggaagctattcctaattaggtatatacactatcctaaatgacaacaatggggaaagggagctgaagttacttcctgctgaaatgggacgacgatagccttgtggggtcctgtaggaagaaaatgttagtatagtggaagtcttgaatggattgtatccagtccatgttagatgggattcgcttgattgaagatctggcttgaaatcctcaacttgattgaagtcagtacccaaaggtctggcgggagtgtcagttgaaatggagcaagttggattcagtgcagtcaaggaggtgtggcccatttactttctggggtgcacagggattgctgtcaggcaggtcatcattggctgtgtgggactcaaacataaacagttaacagagaaatgttttcttgtgtatgtacacatgctgggaaaggcaaccatgggagaataaaaattatgagagggtgtataccttgaagaaaagagccatgaaaagacaaagacagtccccaaattcttcttttattctgtatgacatcaattggcttcttgatacaatacagaaactctaaaatttagttaaataacatgcttggattttagaggaagaaagccaaatccacctctaaatccagaattgatttaattgaatagggactagaaaaagagaaatagagttctctgagagacagctgtaaagtttagcatatggcacgttccttttgtttgatggttatagctaccttctcttcttaagtatctacccatggagtatccattgccttctggagatgagttttcctgtgaagataaaagcaaaacacttccctgtcctttgggaggtttctatttagtttataagatataccttagtagaatacttgtcatttgttcttgtcaagaggttttttcttttcaacgcaaatcttgatcaactttgattgtatccaaagtttttcatctcctgtggaaaccaatgcaatacccctaccccattgtaacacatgtcctggtttccatacagaggttagtacatctttgaagtataccggctgattcagttcagcagttttttctgtagtccagtgtctttccgaagctgtttgtcctttttcattggcatcaagaaagtttagtgttaataaagcattatgcaacctatgttnnnnnnnnnnnnnnnnnnnnnnnnnnnnnnnnnnnnnnnnnnnnnnnnnnnnnnnnnnnnnnnnnnnnnnnnnnnnnnnnnnnnnnnnnnnnnnnnnnnnnnnnnnnnnnnnnnnnnnnnnnnnnnnnnnnnnnnnnnnnnnnnnnnnnnnnnnnnnnnnnnnnnnnnnnnnnnnnnnnnnnnnnnnnnnnnnnnnnnnnnnnnnnnnnnnnnnnnnnnnnnnnnnnnnnnnnnnnnnnnnnnnnnnnnnnnnnnnnnnnnnnnnnnnnnnnnnnnnnnnnnnnnnnnnnnnnnnnnnnnnnnnnnnnnnnnnnnnnnnnnnnnnnnnnnnnnnnnnnnnnnnnnnnnnnnnnnnnnnnnnnnnnnnnnnnnnnnnnnnnnnnnnnnnnnnnnnnnnnnnnnnnnnnnnnnnnnnnnnnnnnnnnnnnnnnnnnnnnnnnnnnnnnnnnnnnnnnnnnnnnnnnnnnnnnnnnnnnnnnnnnnnnnnnnnnnnnnnnnnnnnnnnnnnnnnnnnnnnnnnnnnnnnnnnnnnnnnnnnnnnnnnnnnnnnnnnnnnnnnnnnnnnnnnnnnnnnnnnnnnnnnnnnnnnnnnnnnnnnnnnnnnnnnnnnnnnnnnnnnnnnnnnnnnnnnnnnnnnnnnnnnnnnnnnnnnnnnnnnnnnnnnnnnnnnnnnnnnnnnnnnnnnnnnnnnnnnnnnnnnnnnnnnnnnnnnnnnnnnnnnnnnnnnnnnnnnnnnnnnnnnnnnnnnnnnnnnnnnnnnnnnnnnnnnnnnnnnnnnnnnnnnnnnnnnnnnnnnnnnnnnnnnnnnnnnnnnnnnnnnnnnnnnnnnnnnnnnnnnnnnnnnnnnnnnnnnnnnnnnnnnnnnnnnnnnnnnnnnnnnnnnnnnnnnnnnnnnnnnnnnnnnnnnnnnnnnnnnnnnnnnnnnnnnnnnnnnnnnnnnnnnnnnnnnnnnnnnnnnnnnnnnnnnnnnnnnnnnnnnnnnnnnnnnnnnnnnnnnnnnnnnnnnnnnnnnnnnnnnnnnnnnnnnnnnnnnnnnnnnnnnnnnnnnnnnnnnnnnnnnnnnnnnnnnnnnnnnnnnnnnnnnnnnnnnnnnnnnnnnnnnnnnnnnnnnnnnnnnnnnnnnnnnnnnnnnnnnnnnnnnnnnnnnnnnnnnnnnnnnnnnnnnnnnnnnnnnnnnnnnnnnnnnnnnnnnnnnnnnnnnnnnnnnnnnnnnnnnnnnnnnnnnnnnnnnnnnnnnnnnnnnnnnnnnnnnnnnnnnnnnnnnnnnnnnnnnnnnnnnnnnnnnnnnnnnnnnnnnnnnnnnnnnnnnnnnnnnnnnnnnnnnnnnnnnnnnnnnnnnnnnnnnnnnnnnnnnnnnnnnnnnnnnnnnnnnnnnnnnnnnnnnnnnnnnnnnnnnnnnnnnnnnnnnnnnnnnnnnnnnnnnnnnnnnnnnnnnnnnnnnnnnnnnnnnnnnnnnnnnnnnnnnnnnnnnnnnnnnnnnnnnnnnnnnnnnnnnnnnnnnnnnnnnnnnnnnnnnnnnnnnnnnnnnnnnnnnnnnnnnnnnnnnnnnnnnnnnnnnnnnnnnnnnnnnnnnnnnnnnnnnnnnnnnnnnnnnnnnnnnnnnnnnnnnnnnnnnnnnnnnnnnnnnnnnnnnnnnnnnnnnnnnnnnnnnnnnnnnnnnnnnnnnnnnnnnnnnnnnnnnnnnnnnnnnnnnnnnnnnnnnnnnnnnnnnnnnnnnnnnnnnnnnnnnnnnnnnnnnnnnnnnnnnnnnnnnnnnnnnnnnnnnnnnnnnnnnnnnnnnnnnnnnnnnnnnnnnnnnnnnnnnnnnnnnnnnnnnnnnnnnnnnnnnnnnnnnnnnnnnnnnnnnnnnnnnnnnnnnnnnnnnnnnnnnnnnnnnnnnnnnnnnnnnnnnnnnnnnnnnnnnnnnnnnnnnnnnnnnnnnnnnnnnnnnnnnnnnnnnnnnnnnnnnnnnnnnnnnnnnnnnnnnnnnnnnnnnnnnnnnnnnnnnnnnnnnnnnnnnnnnnnnnnnnnnnnnnnnnnnnnnnnnnnnntgtcagcattctccactttcctgacttctttttgataacaaatacaggagaattccaaggactggtagatttctctgtatgtccagcatttagctgttcctgtactaacttttctaaagcctctgacttctcagaggtcataggccattgtcctacccaaactggttcatctgttagccacttcaatggcagggcctttggctcctctgaaggtccatcatttgtacctaatttctgtacagcatggatgattggtaaccgttttccatagcgtcttaccagatcttttctactatctaaagattgtacataatttgtatctgacattggaggaatattaatctgagtattccattgctgtaagagatcacaaccccagagatttacagctatatctgccacgtatggtttcagtatccctttctgtccttccagtccaatgcagaccaccaacttaacactctgttgaactctagatagagtcccaattcctaaaaattgtacatttgcctctttaagaggccatttctgaggccaagacttttgggtaataatagttacatccacctcagtgtctactaagccagaaataactttattattaattttcactttcagctgaggccttttatcattaatagaagcttgccaaaatatgcgtttctcattttgtccattcacacttgattcttcatcactattcaaactaccatttagagcagtatcatttttcaaaataggcaaagaattatctatttgtcctgtgagagattgtctcccactgctacttgaaatgacccgacctttctcgaagtggggaccttcttgaggccccccttcagggtttcctggccttaatgggtttccttgcatgtccctggtcgatctacattcattggtccagtgtctgcccttaccacatcttctacacaatccagaaggcagtggtcttccatatgaggcattgttagaattcgtttgtctacaatttctcttagtatgtcccattttaccacagttgaaacatctaggttcctggtgcctttgtggtctccaggggaaggctcttcctacccaaggttctggttcatagtagtagtaacctctagcttcttggtaccaatgttgacctctgtaaagtgcttctccttcccaagcccttgcatcctcaccactagaacttttaatttcctgttgcctttttaaacctctcgagatggcttctcctacccaagctccagtgtcttgcacatgatagtcaatgttggctgcatacaaaacacattcttcaagtggagctgatctgatctttaaaggcaaaagtattcttttgcatattgggtttgcattttcataagctattgtatatatgattgattgtcttgtttctggatctgttacctgtaattctactgccctagttaatctttgtaagaagtcctggaactgttctgtagtccctgttctattctggcataagcttctaggcgttctcctggctcacgaaccttatcccaggcatgtaatgctgctttcctgcatagagactgtatattgtcatcatattcagcctgagcctctgggttagcataaataccctgcccaagaagtttatctagaggggcttcaaaaccttcatttatgccctgacgctcaaggagctttgcctcttcccttactaatgccttcgactggatttggcatgaattctcaagtacagctgctaccaatcgttcccattctatgggtgtcaccctgttgaaggttgcccatgaatgtaatagctattttacgaatgggctatggagaccatatgagacaactgattctttaatattcttaagatccttcagctgtataggttgccattcataagccatccgtccatgaggatgtttcttagaagctggcttttctaccatggtagctgggtacactaatggtgtacgagtaacaaccttagaaaactagtcctgatacctgggtggagtaggtgcctgggattggagtgattctgcttctgaggcatcccaatgatctttaagcctagtaatgatatccttttgaaaagtttcaatctccttaatcataaaagattccaagcatggtagtgaatctgtaaattgctctaactgttcctctacatgtttttctaggtctttaatatgatcatccttaagcagcatctggatggcatggaaactgccttctaggtattggaatctagattccaggtcatgatttgctgattttgagtcctcagcaatcgaccgtgtggacctatgtaatctgtcagccctgtattgtaaattaccttccaaacattcaaatctagactgaaatttctgatctgctaccttggatgcttcaataattgattgaatggcattgtccaattcttcaaccctatcctgcgtattttgcaccttgcatctagtttctgggtaacattgcctatctgagtttctaactggctacagatattctttagcttgtcacagcctagccactaaggccttagacatggaggatctctctgtgcttatcttatcataaatatgctgcatctcatcttgggtaacagacagctctgttttagtgtactggacacagagccaagcttatcatccaatatttgttccacttgctgcacaattgtggtctgacctaatctgttctctaaaacctcattgcataaagctgttatttcctacaagcaggtggtgaggttatctctgtccctgttcctgagctctctggctagtaatattatttgtaccagcaggctaactgccattacggcatatatgccagtaattggcagattacatcctcctcaaacattgaattcacgtaataagcaaaaatattaccaattttagcaaatgataaatattccaccataattttacattatttctactccagatgcagtaactatctttgatcagcaggtggcacaggcgttcagctactcagcgtggcgtttggccgtggttggtggcagcagtggagagaggtcacaaaagcagctgtgcttatcttagagagtatatggccttgcagccacaaccactgaaagagatgcagctttactgaagcagcagccaggggaagctgctgctgaaagccaaggcctactcgactctaggcagctagaaactgtctccaagctgggtggatggttttgagcagctcagctgcagcgggaatgcgcttgtgtggtgcagcgggttggctgggagccaggagcacctgtggagagagggagctttcctggcctaggctgccggccggtggaacaacagcctgtcccaaatgggttgtaggtttccaatatcccgctcctgacaaccagatatagtgggaaattaccaacatggagccaaatagaaatataagcgtatttaatagggaaaagccttacttacagagcaacctagccagctggcatggcagcagtctgtacagtcgaaaggggtgaaaactgaaagtgaaactcagccaactgaaacttttactctacatcaccctgaccacgcccttgaaggcatggtcaggcagacctgtagccagcccctaagcaggtgtggctacaggttcccctacaggagcccacttgttttcagttcatattgtttgcttgctttcctgatagaaaattagcaagctacacaccaggatctaataggatcccatagccaaagacttttatcatctgtcctttcagggcttagagcagtgctagggtcagttagaacctgggtgagtagctgaattgtgaacaaagttctcctccactgtgctctcctcaacctgcttacatcaactcatcaacctgcttacatgtagacgttcatttatagctctttcttctttcagccttagtcaggaaggctaagactcttgtcagacatttagatgtctacatttataagtgagaattgaaggaagacatttatgactagaactctattgtgagttgctttcttcctcagagtagggtggtacattttggcaatgttatggtggacttcaattctgcatgtgtgtgtggctgtggatggagaaaattgcctgaggttgggagtcaggatgaaattttactgatgaatgacctgtttttgaactattggtcccacaggactggaaatgagtgcaaagaggctcaaaggtgctgatgatcatttgaattggtgtcggcccttccttcctcaggtagagtccacaccttctgttttcatcataaattgctacatactgtagtttgcatctcagaagtatcccccaagtcccatgtgttaaagtttcattccacagcatgatagtactagaggtgatggaatcttcaagtgataaagactagtgtgaagccttgggtccctgggtgcataactttgtctgtctctccctctctctctcctcccgtccctctctctctctctcatacacacacacacacacacacacacacacacacacacacacacacacacacacttctgaccatgaaatgactgttcactgtgctatctcctctcaaccattaggtgctgccttgccatgggcccaaagggatgggaccaattaaccgtgaatgaaaacctctgaaaccacaaactaaaataaactttctctaggcatttattagaacaacagaaagagggctaatgcaccctggttgcccacactaagagatgctgggatatctgtgagagccacactctaatctggatactctctaaccattacagcactttatcctttcaacaaaagtaggaggttgttaatttaatctgcttacttaggtttaaattattcatttatttatactgtggttgaagaagcaaaactttctacaagccactcctactgtaagtgtcgaccatgatcatgaatgagcagctccgaagcctgccttcattctgtaataatactcaacctgaaacctagttatgagcagggaggcctatgacgatgtctcactggaaggaagatgcctgtcatggttaatactgtcacttggcaggatctagaatctgggcctgtctgtgagaagtcatctggactaggttaactgaggcaggaagagccactctacatttggttccatccgtggctggggtctcaaactacattaaaagaaaaaaaccaggcagagtgcaagcattcattgctttctgcttcttgaatgtgggtgtcatgtgatgagctgcatctggctcctgccactatgatgcccccaccatgatggactatgtccttgaactgtactcacacccttcctgatgtgacttttgtcagctatcatgtttctgcacaacacaagccactcatacatcttcctcacaatcaactcagttcggcctttggttgttgaccttgagccataggcatcttagagatcacctgattcaaagattacccaccacaagggtcttttctttgcatacaatccaagatgcagacccacagcttaataagacatcccaatctaccccagggcaagtcttatcaataattataatatctgtggcctcctttattagttttacaagctctaatatctcgccagcctggcctaatgaataagcccattgcaatcatgagggaaggaaacaagaattagttcatccctttctttactcagtgttcattgctggaagtcaggactacagattccaagttttgcctgtctctgttattctgagccagcatccatgctacaatcccagcctctcacccacgactgtgagtgaaatgtgctctgcataaaatcaccctactcacccaggcactggctccctttttaccttacctactcaagaacgttattccaactaatctcctttgtctcacctccactattgatttcctgctctgtactggagcactgtgtctgcatacaaataagctcccctatatgtatgcttcaaaagattcctcactagaccccatgccagggcccagatacttccttgctttcttcctcaacaaatgttgtcaaatattgatactgattaactcttaagtccatattgcctaatgcttaagtgttttttctttctttttttttaaagaacaataatttgccatgaaggcaaagttttatcaagtacatttacctgtatagcccagacaaggcacaaaacatgtcttgccactctccacaattctcttgtgctcctttacaattatttttcctcccctagaagtatctatgactctcacttctcttactgcagactcatgtcacttattactgactttcatacattagaaattatccagcagtaaatgttgggcccttcccccattggggtctgctgaccatcttgtgactaagagccccgttgggcccttcttgggggtccactgacagtctcgtgactaggagtttacttccttgtttccctccttccaacaaggcctgaatgcaagaatgcaaaatatctgcccatccctattgccagagggacttggggacttgaacttctgacctgggtagctttccactgtgcctattgactggcatataagtcttccctcctttgaaataaatggcattctccttgcaagaatggcccgttgtcttgtctttatttgaatcctcaggctcctcacctgaatctgtgtgaagtgttgtagccctggcactacaagtaaatatgttagatttggcttcttttcacaatagagtgtcagtgtcttagctacattagtatttgtaagctttttactatgggaattattactaattgatttaattattggctttaaaaaactttgcaaaattcctcccacttttgcaatatattataatatatttataagagtagcaagaccaaattttcacagcctaccctcatgggggtgggggaggcaggcaggtattacattggacttatgacccatgggtaagaaagaaccctcaggatcatattttaattatactacataacatttttaggtggatagagagatagaaagagatggagatttatagatggaaagagagatagatgatacatagatgattggtagatagatgatagatagatagatagatagatagatagatagatagatagatagatagatcaaattatctgcagaatagaagtcccttgtcagatatgggtattgcaaatatttttcccagactctagtttcagtgtacttacttaatggtaccatctgtctatgcacttttttgtctttttcttttaagccaggttctcatgtatcaatgcttgtcttaaacttgctatgcagctgagtatgatcttgaactcttgatcctctctccttctaactcccaagtgctggggttacaaacttggccaatcctgcatggctaatattgctttttgatgagcaaatgtattaaagtttaataaagagcagtccataattgtgttcttttatgattagtgatttctgtctcttgcccaagacatgtttttcttcccatatactgttaatatagcgtgtgtgtgtgtgtgtgtgtgtgtgtgtgtgtgtgtgtgtgtgtgtgtgtgtgtgttttctccgcagtgctttgtagtgtattcagcctaggatccatttaacaaacattgcgtgtatgtgggtgcggatgctgtgatatgggattaaggttcattttttcatcccagtacagtaaagcattttctttctctattgaattacttttgatgttttcaccaaaaatcagccctttataaccctttgtttgttcctttaatctacctggcaaccattatgtcaacagcacactctctgtgtaaatcataaccttataatgtcttccagctatgtcctctttaagagcttctgtgatggcagcagtacaggtcctattcgtgctttttcacacacactagagaaggtctgtgaacaggaggctgggaggagtgaaactgtccatatccctcctccacaaggactctgtcctactacactagcccacacttgccccgtagtcattcaccacacacttgtatggctctggacccttgtctcatagatgagatgcctcgtttcttgtctccaagaaaagaagatactcacttttctgacatttcaagttgttttcccccagagactatgggtctttgagtggtctgaaagaaactgtgatcatgggatttagtcacacatttttgtaagtttgttgttattgttgtggttgtcatatgaccctcattgatgtgctttttccttcctgacataaacaatcccattacagtgtttgggcttttaacatgatataaaagaggtctgatagctgggtatgcctataaatcctagcacttgggaggctaaggcatgaagattgtgaatttaaggactgtaaagtgaaatatccagttggagtcatattgctaatgttctaggtatgtgtgtgaggggtcaggtgatggggaaagggtcagggagcagggagagggagagagaaatgcatgcatatgagtgtttgggtacataaatggcctgtgagcacaaatgcaaagaccagaagaagatgtagttgtcttcctctatcactctccatcttgttccgttgagacaggatctctcattgaattggaaacttgctaccctggccacccagtgaacacctcgtgatccacctgtctccaccacccttcagggctagagttccaaactctgccacatcttggagcatttggataacaactcaggttctcaagcttgaacactcttcacttagctcactgagaacccctccccatatgatgatctctcaatatttatgctttcttaatttttcttgatcagctttgtgaagttttttaaaattgtattaagaattgtaaatacatacatttcagcattgttaatcatgtgtttctattgctttctgtttcccatttccacttttatcttgttttcattacagttttgaattagacttactttttcttgttgcttcttaacgagaaagctcagataattgattgtgaatctttgctcttctctgctataaaaatttgtagttatgaatttctaaggacttcctcagcttcatctcacagagttcaatgttttcattgaaactttcactattattcattttattttatttttaagattttatttatttattatgtatacaacattctgcttccatgtatatctgcacaccggaagagggcaccagatcttataatggatggttgtaaaccaccatgtggttgctgggaattgaactcaggacctctggaagagcagtcagtgctcttaacctctgagccatctctccagccctattattcatttaaaaatagttctagattcccttaacttttctttggtgcatggttcagggagcagagtgtcttcatttcctgagatttgaaattttcccatcttctttttgttaccagttttaaatttagattttgtttggtctgagactacactgcagtgatatattatttatgatttattaaaccttgactgaggattcagaaaagtaaagtcagccacaaatcttagaagctaggcatacacctttaatcccaccagccaaaagctaggagatggtgggacatacctttaatcccaggactcagaattaagaggtagatagatctctgtgagtccaaggccacccagattacacaagagtgaatcagtctaaaagagaattatagctcacacctttaatcccaacattagggaagtatataagacagaagcaaggtctcagagaggcattcattctccagaaacgctgaggaggggttatagagtgaggcttggtgagagctcgtggagacaggatcagcccattctgcctgaggtagaggtgagaacatattgtttggctgctttgcttttccgatattcatcttgaagcttgaaccctaatatctgtctctgggtcatttattttttcgtgttacactatactttcagagatttcagacttcaatgtgaagtttattcggacttgtttttgtgatctagagaatgttttcttttttaaaaaaattggttaatgtcctctgtacacttgaaaataatggtttaacactctacagttgtccagcatcacaaatgtcatttggttcatggttcatatttgttgttcaaatctactgtatcttcattgtttttctccctgtcagtatcatcatagtttttctgtgtcccatcttttacctgcttgcttagtgacatgaagtcaaagtatctgtggtggtttgtcttcattgtcaacttgctaaaagagaaaagggaggaaatgatcaattaaacagcattcaactctctctgcattctgtctgaggacacagtataaccagctgcctcacactgtagggagagaccctggatacctgtaccgctgaccacacttagggttgggtttggaaagaggtgttcaggcttggacatctctttcagatgactttagagtttagatgggatagatatggttaggatgagatataggtagattattgtatcttcttgtgttttaccttagtgattattaactataggtaacttgtactgttatagatccttgtatgatgtaactatgtataatttgcatatcacaagtcttcttactgtgtaaagtcttctctctacttatgatgatgtacgctcttacatatgttaagacattttgtacacagtttatttttgtttcaagtttaaatctttttttttttttagactaaaaggggaactctagggagagatcctggatacctgtacctgtatgtgtagaaggggtgtggaataaagggctgagagagagggcacaggtcctcttggttcctgttgggtcacagagagcagctgagcttgatcctcggagctggaacttggggttattggtttctcgcgtaagtgacctctcctcgaataaaatcaacctatattatcccgtctatcttactctgttcatccacatcacagcctgccacttagctctggccactactacagctgccatgccttttcctaccatgagagtcaaaatgaacccctccttcactaagcaacaagaacagtaaccattcgtctttacctagttttgcctggttttaagattggatttgcaaggagtttgatatgatgtcacctgggaaaactgtggctatgacttgttagctgtgtctgctactggtcagaattcccctttgtgattaaacatcataaagatgcagaaacccaagcaccatggtactttcccagttgccacacacacacacacacacacacacacacacacacacaggcgcgagtgcacacatgcgctaaaatggtttgcattctcagaataccccagctttactattgtatgatttgtctgtggtttgaattcattttgttctaagtaaagaatgccctgaagtttatcatgatttggagaaggaaacaaggctcccttattttcacgaatataccatgcacctcatcaatactcatggaaaaagtcttcaaagttcatagggcaacacccaacacccctttcctgatcagcctgctcctgtttgtctctggagtgtactgccctttgctttgcttcctaaatgaccttctgcatcagcctgtctttatctcttagccaaatgctttcctttgaaaggaagcagctgaggagaaaccatcacagttttttggtctgtgtttgctcagactttgagtactcctctttggaatatagccagctagcattgctagataatactgatgatttgttgtttttactgttctgaaatgtttttcttctttctggttctgctgtctggtgtcaatatgatcacctcaaatttcttctcattagagataacaggtgcactttttacacatacttttattttcatttgccggtgctttcagatctaaaatacatctgtggtagtttgaacgtaattggcccccataagctcattgggagtggcaatacttggaactgtggccttgttagaggaagtatgtcactgtgggtgtgggatgtgagctctcctttgctcaagcttcactcagagtgacactcagaccacttcctgttgcctgtgagtcaagatataggacccagctccttctccagcaccatatctgcctgcatgccaccgtgttgcaccttgataataatggactaagctatcccaattaaatgtttttactttgtaagagatactgtggtgtctcttcacagtaatagaaaccataactaaaacattttagatataaaatatatctttgtaaatagtatgtagttgagtcttacctttaaaaaatccatttcaacactttcttttaattttattatttaattcattaacatttaatattcaccaatacaacaaaattcaactctaccatctttgtctttttgtttatttattcccaggcataagcatcttatacttcttaggatttactggaatagtagctttcaattcctgtgataattactttgatctgtactgtgatacggatctgattaaatttaagctgcctttattagcaccatgtttaacctatatgctacttgtgcctttttaatggtgttatcactcaagttggaaagtgattggcaacttctagcatttaaaaaaattgcctttagccgggcattggtggcgtacgcctttacagccaattctaggaagtttccagaatctacacagcattagagtgcccctatgtatcacctcttctcatgcatttctgctttctccacagaatttatgggatcataggatgcgttttagccaaggtttctattgctgtgatgaaacaccatgaccaaaaagcaaggtggggaggaaagggtttatttcactcacagttctatataacagtccatcatcaagatcagtgagggagctgatgcagaggccatggaggggtgatgcttattggcttgcttcccatggtttgatcaggctgttttcttatagaacctaggaccaccagtccgggaatggcaccacccattgtggtccaggctctccctaatcaatcaataactaagaaaatgccctacatcttactcttatggaatctttttctcaagtgtggttcccatcttcagataactctagcttgtgtcaaggtgacataaaaccgtccagcccaggaagtaagctaggtagagctaaccagctgttttccttccaatcttctgtcactccccttcctttcttccttccttccattcttcctttcttcccttcttccttccttccttcccctcctcctccctcccaccctccctcccctccctcctccctcccttccttccctccttcatcccttctttccttcactctttccttccttccttcctttcttccttccttccttccttccttccttccttcattctctccctccctccctcctttccttccttccttccctccttcatcccttctttccttcactctttccttcctttcttccttcctccttccttccttctttccccttccttcctccctcactccctccctccctccctcccttccttccttccttccttccttccttccttccttccttccttcccttctttacttctgtccctccttcctgtatgctttccctccttctgtcttttttctttgattaattcttctcatccttgtttttctttttgaaccttggtttttgtcaacttgcctcaaactcgggtcacctgggaagaggaaatctcagtcgagaaactacttccatcaacttggcctgtgcatatgtatgtggagcatgttcttgattgatgactgaaatagaagagccaagcccactgtgggcagtgccacccctggacaggtcctgtattatataagaaatcatgggaccaagccacagggaccaagccaatgagcagttttccttcatggttcctacccctgctcctgctcaagttcctatcctgatttccttcaatgattggctgtgatagggatgggtaagacaaatgaactctttcctcccccaagttgcttttggtcatgctattttttattgtaatggaaagcaaacttggaaagaattggtaccgaaagtggggtgttaactattattaaaacaaccaggttagtttggggggatgaagattgtcaaggtgtttggaactttgggctagaaaagctgccaagtgctcagaatttaatgggctgttattgagagcttggaaaataagaatgttgacagacatgtatatattgtaggtcttgcttataaaatttcagagggaagaaaagattcattctattaggactacttgtgttatacatttaaattaagaatttttggaatttggagctgagcttttcacaatccattgatctgtgcattgggtccagttgtggttttctataatggtctcaatctgctgtaaagagaaacttattttatgaggagtaagagctatacttatctgtgggtataaggataaattctgtaatgcagcttggaattatagtggtctagtaagttgataattataggttcttttccaagatgtgttaccttactgtcacctggtagttggcttggtttctagtaccaggcactatttcctgttgagtgggcattaagtctagttagacacctgttagttactgcaaagaaatgagtatcactattgtatctttagggctatcttaccatgctggtcattgttatagttcacagatggatagaactgactgtttccttctcttggcaacttacacagtattttcaagtactatggaagctacattgcaggaaagagactttcaggttagatccagctagaatcttccaactcctgtgtccaaattgttcagtgtgtaaacaataggggcttagaatctgtggctgtcaaacctccacttattgagacaatggatgctggttagaaggagctgaaaagtcagctgtgattaatatgagatcagcatcattgagataatcttggaagtatttcctggggatcagcacatagaacccaggatccagaagggggcaaagctacatctcaatctggtagatgaaatcagtgttgtgtaattgtactagtgtgaaaggtatgcggtctaaaggctgactgattttcctcgcttctgccaagtttctttcaggtctgaggctactggactctctgtcttcctttgcatgacaatattttttgggaattcaatttaattcaattaatcataacacctttaccttgaaagttatttgctaggcccaaaagaaaagtatgataatcattgtcccgtggtttttgttgttgttgttgttgccataggaacaaagtattttcatatcattccacactgagactggagcatcttccaagatctcattttcccccaatgcactccacttaggctttctttcatttagagtatgtggatgaagcatccgttgtcactgttgacaatgatatcactaaacctagtggttaataattagtctaattctatctgtctgaccatctgccaaagcccatcatatccttcaaatgctatctctgtgcttcatatgggtcctgaagtatcagtctctactatctcctgtcttacatcatggctgattctcccccccccccacatgtgtgtagatgtgtctgtgtctgtgtatgtgtgtgagtgtgtgcgtgttgtgtatgggtcgtctaatctttttcttactggagtggtagcggtcctatgttacgtctgcccatagttatgactcctccctgggtgaccctatccatcctatagaaccgaaatgcccttcttttatttatattttgaaaggttatatttcttattgaactcctgacttttatatatgttttacactatataatattaaattggtgaatatgtattttataatgttattgtactatatataatatacaatgtagataatatatcacctatttaatattgcactttagtatgtacacgcctctgagattagacacattcagagtgaaactcacttgttcttcatccaaagcccaccttctctgtgaggtctccccagagtgcatgacaataccatccctttagtcgctcatatcaaaatccatgaattccttttgattcccctttaagaacttacagacaacctgacagcaaatcccgtgactttatcttcaaatcacagacacagtattaacacccaactccccgacatcaccctacttcaaaccaccatccctgggtcattccacagattccttaccagccatctggcttccagccttcctctcacctctcccatgcttgttagtcctctccacatagctatgagaaaatctggtaagtcctcaagcaaatcagctggctgttctgccaagaatgcctaatggtttcttctctccttcaaagcaaatactaaagtcttttggtagattaaggggccacattttatgtggtccctctacatccttgaaatctgtctgctaagtccttgattctacctgttccattctctccctaaccctgttcaatccatgcattgcttcacacatagtaaacagttttacttggtcattggtctcattgttctctgctagaacttgttctgtcaaaaagcttcacattcatttctaacttcctgcgagtctctgatcaaataccattttattagcctagcctttcctgaaagttctctggatacagtaacaccccctacaagacctactcaccccattgttcaccccttctgctttatggttctttaaagttccaatttctctatgacataatgtacttaaccatttgtctgctgtctttctttctctctgtatagtattttcaattatagcaagaatctttggggttctattcattgcactaccaggacctatagaatgtcatagtttcagtagatgctcaaaaatatacaccgaatgatgaggagatccccttgttcccttctactgatgccatcatattctgtggcacagtctcacacttatccctggtgaacagtctggaactttgagaccttctgacatcacttaggggaaacatttccagatcctgatcattggttctcatttcctggaagtcaggatctgaggcagcaacaagctgtgaagaccttactgcctcttccccaccttaatgactctctagcaagcctattacattggagctctgcttcccacatctcttttcaatcctttgcttctctgtctcaaaccacacaggtcccacgagtggctcaacaccctttcagcacttgctgtctcccatggattaatagatacaggctgttctagtatctgtgtaagttctaacgcagaaaaaaaaaatgagcctaggaatgatttgtagttgtgggcatgtatcagtaattaaaacagaaagaaattatggacaataaccatctgtataatatataatactggcctccctgcaggtcaaacaagtgacacaggtcttgtatgtatataagagacataggtcctgtattgtttctggttatggctttgatatgctgagtgacctgagacgccagctgtactccaggtttctcaagcctaaagctttgtatttgttgcaagttttctcttcctttagtgacctgcatgccatccattaggaaccatgccaatccatcttcaaattatatccagaatttgagcactaacttcgctgatgtcacctggttcaagccactgtcttatcttctctgtgtttctatttaattttattttattttactttatcaagcccaatagtgcctaaacttaccataatcatttttctccagatgttgtggatctgtagagactcattacgtgactttcctggagaaatgcagacagatgtcatcccagattgagcattaacctcagacaaaagaaatgattcacccaggtccaacatagtgagccaataaacttattggggttgcttacaggaacatgggggaagagtacttacaggagcaaggtgacttaaacacagttgcattaccaaaaagtccactgcagcatgggtgattgctcatggaagctgaatccctagagctttctgtacactgaagtcaactttgctgaagagattcttctcatgccagcaatgacttactgcctttataaccccgggaaagggtcttggattttgaaatgtcctgagtgccctgagttcctaagtttccttagctttgagtcccaaaagagtgatgactcatactatgtctgggttatagatatgagtcactgcaccatgtttatggtttatgccatgctggggattagagacagggtttggtgtatggtgggcagtgatctatcaactgagctacatcttcagtccctaaaatataacttttgtctcaaaaaactaaattttacttcttactaaatattaaagtacaggggtagtagttttggaggtcttttccaccatgagtacctctacaaattacaatatgcttatgagctattaattccctggttcagggtaaaacttgaattttccaacattaaattgacaagagtggaagtgaaaagtttatttatgcctctatgctctccactgggtaggtaatgaggcacgggttctcttttgctgtgggatgaaagaaataatcagaaggttggataaggttgcaactctttcaccatggcatttaggacctgcctgatctcattattgccaccagtatattcaaacaggggtggcaagataagagaaagagagaaaaaagtctcttcctttggtcatctcaaattataagctaacagattcattcccatggaaataaacacagaatctacctacacaaggcaagcaatgtgtcatctttataacaaaggaatgtgattttcactctcagttactcctgtctccaatgtgtcatattccagaaattctgttctctgcatgtcctgagtcagggggtactttaacagtttggtcagcaagaagaaggtccttgaatagtactacagcatagtacagtttaaatggtaatggtgtgaagtccatcacctttgcatgcatggggactggctcttttttgtttgtttgttttgttttgttttgttttggagaaccagtgctgttagagactaggtccagcctgtcagttgtctcatggggaccagtaagtccctggagggttggtctccattctccttttatactggacagaaatcactgccactggatctcctgtgattcttctttgtgtgtgtgtttgcttctgtatgtgttatgatctccctaagttccaagacagcacatatgggacacagcacttcataagcaagtggaaatattggccactttaaaaataaatcttcaaattttgtattaatgtacattcttcaaatttcaagctaattttgtgttgactgataatccttttcaacattgacaatatttacagcaatctaatttgggacaggttcacattcacatggaagtgaaggattagggtgttgtaaagacagaagacttggttttgggggtcttggaacagagaagaaaaaagattaaggtgagcattattacaaactttactaccttgatgtttagatctatattgagaactggagttttgtgtctagttatccaaatgctaaaacttgggggggtcaatcctctttcttcaaacgccttcctccctccctctctttctttgtcccttccttccccttcttatggtactggcagcatggtcttactatgtagcagacttgtaccttctccacataaaagggattcttttgttttttttttttcatagcaatgttctagttcttccctgggctcccaaaccatcttcaaactctgaagattttatacaaggggtcagtctgcccttggttctcctggagcacagcacagcctcagcatggatgattggacaatgcactaattcttgtacatggtaattagctttccttgggcagcctactttggatctcttcagctcattctgtagaccttcgagataagaaaataatgctaattaagaggatgttcatgaatgctaaaacaatggctgtaaagacttcatcctcaatggacccttgggaaaatacctgatactatggataagatgtattttcacccaatcttggtgtaattatgccatataagaggttggaggttgattcgtagtggaagctgtaggcaagcacaatattttgggcatcttaatttagcaaaggctacatgggaattggactagacttccaaagacttctagaaacataggtcatgttgttagagttgcaataaagacccattaaggaaaaagtccttctggtcaagagactgcagtggttggctctaatggagacttaacattccagtagacctgtcaatctcccggccaagggacctcctctcagaaaggagggacagcccctaggaaagcaggctttcttaagtcatgctaaagagatgggtggaataatttaatgaaatactgcagtttcccttcccagaattcccaccactaactcagtggcttaatgagcacagcctggctattctgctgctctgcaagtctctgttgcttcctgggttactctcagggctgggcaggcctagcctaggaacatgcagaggctcactgagcagtgaaacttctgcttccacacccaagatgcgccacccaccctgtcccgagctgcagccctctctgagttcttgctctgctataagcacaccctcctaatgctttgtgcttcgctctttctctagcaccactccccaccattttgcagcctaccacatggctagagacagcaccagtttaactaagtgctaaagccctttcccttttttcctcaattgtctgcctctggacaggtactgtgacttacagcctgcctgctgagggttttctttccatctctagtaaacttgttctcaagctttcatttgagtctgttcttaaattctgtcatgaatgggactaatttccccagtaatatccggtgaccacaaaataccctcaaaattttcagtaaaaagggaggtcaacattctcaacttctctctttctttccttttaactcctgtatcctaggctgaccttaaacttgtgttgtagctgaggatggccttgatcttcttgcctccactctccctctgctgggattacaggtatacaccaccaggcctggtttccatagtgctggcaatcaaacccagggctttggacattttagacaatcgctctaccactgagtgttatatcctcagtccttctcttttccttttaaacttagtcaactgactagcctttgttggtttcagcaaagattttcctggccatgctagtactgcagagcatattcaggaaggatcctggtgacctctatcacttccagagaaataaaggcaatgagcagcagagtcagtatctgaacccagagaggtccctcccatcatgtgctctttattatctattgcaattgctttaacccaggcaggaaagaaagactggggcacagagagagaagctcctcattccagagtctggtctagcttctggctgactgaaaatcaagaatgccaacgtaagtagcaacattccttttacatagctatattttaaataagtcctttcctagacaagaatttgaaaatttctaggattcttgtaaacacccccgccccgctttcctataaatgtagtaaaaggcatgtattaactcttttgcttaagccttatgaacattgattgggacttaaataataaatgatgtctgccacagagaacataaccaaggaggcaaacaggggtcctttacttagcaaaggattacaaacaaatttatatatgtttttaccttttgtctcatggctttttataaattcaaaattgtgagatggctacagacacaggcatggtagagaggaaattaacccccacaccccacacacacataaattttaccaccccattttctttttaccagttctggcttcctgatttcttttggaacacagagaaactgaagtgttatgttcacagatgtaggtgtctagtaatgcaaccaggtattaataaaagcaggaagagatatcagggtagctggtcatggtctctctaataaaaagtccaaggggcagaaaaacaacacacctgtgatccttccttgaacattctagagttggtgatgaatacagatgcttatgaaatgatactgtgtgtttacataagacacccattatctgtatgataatgtgaaatttgggggtcccctctttgagttctcagtgtccttaataaaataatttttgaaaactgactcagtaggaagtttgacaattttattagagtctaacaattttattagagtctaagtaaaacaatagcagtgagctgtaaattttggcagccactgagaggaggaatctaaagaataggaagaaagaaagctgggtatggaggtcagcaagcagttacaaggtagacaatcaggtgcctgctaagttggaggaggcttcagagaaaatgaaagacccccagaggctcagggccccaggatctcagcccaggaccgtggccaccccaatcaccatgcggaggcagaaacttgatgcaaacagcaagaggctttattgtagttgttcaatgagctaaccccatgttagctggggctttgcatccacccgccatggcggatggctaggaaagacactgcaaagccactgcatagagatcttatagggcaacctaaggggagtgtctaggggtatccacaggctcaggattggtatgcttccaggcttagagggtttgccctgtgttgattggttaactagttgttatggcccataggccctcccagggcagttgctatgctctgcgcatcattgctgtgcacttgtccttaatgcacacccagagtcctaaagtatagcaccaccagctaacttctgattggttccttgccacgaggcaggcatctgacctcctagtgaccaagacaaggtcaggcaagtacgtgttcgcctgttatggctgccaaaatggggagctggtcccttcgaaagcatatccaggttctgaccaataggcaaaagaaaaaaaaatggttttaaaagaaaaagaaagcagttcatttttctgagtaatccagaaaagcaggcaggtttaccagagccccgtgatggtggtttcataagtgactgactgagagtggagttcactaagtgaatacttattctgcccatgtcttcaacacaactttagatgaaggatgaagcagccttcctgcgaggatgctgcttagccaggtgattgacaggcaaactggaaggatacagtggtatagaatgttctcatctttggagcaggtcagaatgtcatgtctcccaccaaggtattcctgtcttttgagcaggacttaacatgtagtaaagatgatttttacctttccagtgttactagaggaatgaaaaatgtgatttaaagtttcagtggccttcaggtttaaagctactgtgacatatgtatacatttttttttttttgctgtattcttgcatgtatgtgtctatccatacatacagaatcatatagaggccactattattgtaaacactatttgacaatgtgaaaagcacaggtttcacctcatagtatgtaagagatcatttattttggagccaaatatgagtgaccatagcatgggaacacatactcaggttacctcaaactccatgttcaacatattagcaattttacaaagcttgactagaagcaaaacactgtcataaatgaagacacatttcagatgtattggtgggtgtgtcaggaaggagtgttatagcaaagtgagagaatctcagccataggcctcaggtgttatctgagttagtggaaggtagaggctctgtctgcacattccaaaggatttacctaatagttagaaggctgtgttaactatgtacagaaatggtttataaatgactggttaagggaagccaagataactcaagatagccaagataactcaagatagccaagataactcaagataatttttctttcaactctggacttgtaactgtccaaccactccacaactactgacgtcctccaaatcagttagttagtctttgtggaacctttagtgcaagattcgcttcctaccagggactttgattcatgttgctttccatctcaacttttcgtttccctgtttcttcagaaaaaaaaaataaattgacacatattttcatttgacataagaaaactaaaatgttatcgaagaaaatgtaggaacagtagggtaatgagtgacctttcaaacagttttcatctttaagaattttttctcttcaatttttacaagtcccttggttaaagtatgtttaatcaatacactaatttagtcatcggattgatagtattagctattatgtctccttctagtaaattttaagctccttcaggcaggaaccatggctcattcaactttctatttctgaattttctctttctccacaaggcctatctcagtggcttgtacctagcaagtattcgatgaatgttcctgagccatattttgcatgaaaattgtagaagccctaagaagccatgggaataaagattcaagtgtcaaatgaaaaatgagttttaaattgaagacatagtaataaagtatctacaatgttcccgggagaccagcttcattccaaatatgcatttggcattggggtttccattttctccaagataagtgtgttccagtttattgggtccattcaaggcaccagcatgttcctatcattcaaatcaggtcagcctacagaaacagacttaggcagcaggaacatgcaaaagagaaattttgattaacaaatgtccctgctcagtctcccaaaggaaaaggcagaattgctttctcatgataacgaggattaaccaaatgaacaattgcagctaatctctgagtgtccaggttagtctgaagtgctcttttccaaaataaaatcgggcggtcccggtccctgttccacagaagtcttttcacccacgctaaccagtctgcaaagtggacgaactgtggggagagtgtgccaggtgggcattctcacctttccctaaagctttgaattttatttatttatttagtattattcacctttatttcagtttgtaaaatcttgatgtatgcatgaagtgtgtgtgtgtacagatgtgtgtgtatgtgcatctgtgcatgtctgcgcaggcgcacaaatccacggtgcccgtgtggaggtcagagggcaactcggggtgttgatcttgctctccttatttaagacaaggtttcatttctgttgttcatgactgcaagaaactagaatttggagagtccaagtatcgattgaaacctcatgtctgccaaccccaataggaattcacaggtcttctttcatttgtatcttcaaccctgaggttcagacaagtaaatgatttgttgaaagtaaatccaattaatgagagccagggatttaaacaagatctgttaactccagagcccataatgctacctcccacaacccttatcctggcaccgcccaagttcacaactatgtgtcggtgcaagtgggactgagtagcttatgggtgtcagggtgttctgagcacaccccaaatcagggagctaataagatataatcttagacctttagggtaatggtaagagacaaacatctactaagaaccaactgtacattaagcagagttctaggaacttaagttaacgatagaccatctatatggtagatttaatgaacaaaataataaatcatttctgttttgaagactaggtatttctagtcataagatctatggaagaatgattttcttgagctctgtagattcatagatctcactctaggttaaggattcttaaattctttccattgagacatatttatataaccctgagcatacagctacatcaaatagatataccaatcaaatacttactgatgatgaaccacaaagacagttattttaaaacaattctttggagatgggagttttattcagtgatagagtgtttgcctagcagctagcaagcacaaggtcctgcctgagctcaactccagaatcacagacacaaacaaatgaacacaggcaacaccgacaattcatttaaattatccataacaaattagaacattaatgatatagatgtgtttatttttacataaaggattaaatcttggcaaaatttgatactacaggacatttttcacagttgactaatattttgatttcatgcttgtcagtactgagaagctgcacataatcgatgcatttaaataagatacagataaaaattttctctcacaaaggtaaaaaggaagctgaattaccactgtttatggacatccactgggatcttttgctagaaatgactgggcttaagaaataaataaaacataacaccttcttccattcacatacaatacaagatgtacacatgaattcatacaggctgacatgtgctaagtatcagacacaagaagacaaatgagaaaaatggggagttgaaggtttttaacacgacaggagaaaagatgggagccatttcactacccttggatttcaaggctcagtttgcaaaattaagaaggaaaaaaaaaaaaaaaccctgcttttggcgttgcacagaaaacaagtgccacactgctcactgagtgactaatgataactgaaccaggggtgtgccttgggagccatctgccaagacctgctgcttgcacttggtgccagtgggatttatagagaagacagtggcttgttgagcttcagtcagatgcatgtgtgtgagcaggcttgccttacagatagctacagccttgtaaaatgaatatggttgctggtccctgtgattcaaaaatcatcaccctggggcctttcttacctctccctggaagggcaatttgttaactctcagaggccaaatgcaattgtatattcctacataactcttgcagccctggtgaattctgatttgcctattttcagatattttgtcttgatcatttccaaatgtgttcaaattgttttgcaagaaaacaaatggagttcattgaaggttactgatgcaatgcatggaaaggagagaaatggcatgtctgggttctgagtttattcgcaaagaaaatggaaggactaaaacccaaagtgcaaactctgtgaaactcgtgagtaatagggtgatacaaggttattgaaaacagcatgttgtgagcacacagttctggtaactggtggtactcagtgtcagccctcaggaagcaaatgtctgcaacagatacctttggttccccatagtgacaggcaaggtaaatgcaattatattgttcttttagccaaagacagagaaagtctgtgctgcccattttttcatcatgagcaactatttaagctagataagtgccaagctaatattgtgtgatattttggtcatattctgtcaataaagcttgcttggagtcagagggcagagctagccactggctgaccaaaattaatagaggttttagaggacccaggaagtagtaaggtgaggcttagagaggatctctgccctttttgactgaggaggtgactggtgacttctctgctttctgatatctgactcccaaagttttaatgataaagagtattagataaacacaccatgctgatatttaccaacatttgtgcataataagatctaaattcccacctatcatgctgggaaaggaacctacggcattgggcatgctggttaattactcctctacctttgtactaagatctaatgttttgctgaaatagaatggttgcattgtaacaaagtagaaaaaagatcactctttctccacttaagttcctctcccatgaatgtatagaacctggaaaatgttcaacaattggctcttaggagtaagggtgggagtcaagccctgacttggtgtgttgactgatgcccatgatgtaaatgttcctgtcattgctgatgtcatgtgatcaactggaagtcactcagtacaaagtcagggagtcatacatttttggccatagcagtgttctggtgtcacacaccatattgagtgacatgagtctgtaagtgacactgaactcataatatcccttatgattgagtcctggcttgagaaggtattccattcaaccaagataaatgagttactctgatatcatccatagtgagtactgaattttttatgtgtgtttcctgtctaaggagaccataacagtatgattaactctaaaaataaacctgacttctctgcctgtactcacacatgactctgggctttcctgacaagtcacagaattaaatgttttgtggagcctcttttggtaaatgattataattccttagtgtcatttgtatcccttggggcactctggaatggccataacataatgtagcagggaatacctttggaaatattttcatcaaacaatttttgttgaggctcttaagacaatttcatctccattcctctggatagtctgcctgtggagttcagattgctacatcagaaggtctacaaattggaatgagaagacaagtcagatataaagggcaaataaaagaattgttttctagggctcagtgaaatggcacagtgggtaaagatgctggccatctgaggatgcaatcctaatggcctgagttcagtctctagaatgcacggagaggtggaaggagagaatggactccttccaaagtttttctctgacctctatactagtggtatgcacacctccagatgcttctctctctctctttttctctctcttgtacacacacacacacacacacacacacacacacacacacacacacacacacacacgtgcaattaattaaatttaaaaagacatgatttctagatgaaagcaaagatccattggagcaggctacttagggactatgacacattttatgtgattaccaagcacatagtctgtcttatctttgctgccttttcctttgacccataaccagatatcttgtcccatgagctcttcctaggaagtggacacataatccatcactctgtgctgtcagtgtaatgtaagacatcacatgatatccatcacaaagtcccacgaattcttccacccctcctcacctcctcccctctgttcatttccccctgggaaccaggtgtgctgcatgtattttatctgtccagggagccatgatgtctgcagctatttaaaatggatgtattgctgtctccacaatgcctaccagcagaaaacttagcttccctcatagttttggcttgttagctccttgaaacaattgttttctctggcttcttgactaagagcccacgagggacagagtgagatgaagaatgccaacagtctgccagtgcctatccctttgagtgaaaggaggtggtgccagcagaagcaggggtctatggccaggacagcaaggtgctggcgacactttgtaaggagcttggtgtctttgtacaatgatgatgtccttacgttctttgcttcttgattacgttggaggcagtgaaattcataatccaggatttcctgtaaacacttatggaagttttgaaatgtaatgggcactcttcccactagtcacagactgtacttttgttttattgtagcccagagaaaagattaggatccttccttccaagagcagtcaaggtgaggctctcccttctgcctgcccccaccccctaccagctcaaaacaagtagagaactcttgcagctggacagagggttctttgagtaaggcattttttgcctaagcatgaggagacctgagttgagagctccagaacccacaataaaaaatgaaaaacagtggaacacagtcatgaacacatctattatcatggcactgtgatgggccaagacaggagggtctgtgatgcttcctgactgctggcagtgctccagggttagtgagagaccctgcatcaaaggaatagagagggatagagcaggaccctgaaatcctcttctagttcctgtgcacagtatgtacacacacacacacacacacacacacacacacacacacacacacacacacacacacacacgtgggtgggaggaagggaaagagagagaaaaaataccttaagattaacacagagcagaggattctccagcttttccttagtaatacttgtcagtgccttaatatcccattgttttgagtcttgaaacagtagcttcatgaaaaaaaatgtatcttatggataaatggaactgttttggggctatgacatgggaacagtttctcttctattgtgctgaacgatcggagggaactgaggtacggcctgatagggtctctggatgatagtggtggtcacctgaatttaatcaagttgactgattaaatagttctttagatttactttttgaaaagttacaaatatttactaattataaatcacctaattctctccctcccttccttttcttctctcctttgagacggaatcacactctatagtccaggctggcctggaactctgtgtagctctggttggcactgaactcatggcagtcttccttgagcctttcaagtactaggattacatggaaccaccatgcctgacagcctaattgtttcctggccctaccagtgttagccatctgcatctgcttcttgtcttatcatttgtcatttcataatggccaaggaaatgaatggagcaataaaaatgactgtcctttgtaaccaagacaaagtaatttgatcaaggaagtgagtgcttccccaacctggatgagggaaaagccataacaggatggagactgggtttcctgactcagatttggacttcggggacttccaacctaagtggggctagctagagattttgttctgtggcacacttgtggtatcagttatgcctacatactttgcccaataatttgtttattatgatttggggatgggaatttcttgaccatgttatagagctattcagctatgcattgtggagatactgtcaaaagcagtttgaaaaatgtaaagttctattaactcaggccagtatgaacaggtttcttgtcatgactaccacacagctgtgctttacttcaatcaaagccactctctactagttcctgggatgtgttgcccaatttctttcttaaccataacacctgctgtgccagaggcagggcacagtgccttagatgttcttcacaccctagacagcagagtgagaattgaacggagcctctgccaagtccaaggggaatgattagaactctgtggagaccacagaacacaggtgctcgtaagtactagaaataggcacttgatagttaaaccatttttccgttagcccttaaggtaacagttcccttagtacattttaggatatatgtgtctgttcagggctgaggtgtgatgattatatcctcttgtacaaactgtaaagccctgggaaaattggctctcacagccccacaaagtaggggactgacctcaacagctgccaaaatacagaagtgaaagcgagtccaggatgactgggaatgacctatcagaggaaaagaaaacacaaatgttcttggtcacgaatattccttggacttttatttttaaaatgggtcaagtagtgtaaggcccctatcacttaacatgtcagtcctacttagcttaatgtcaacttgaaacaggctagaattacaagagaagagaatctcacttggggaattgcccacattagattagccacagatataggcatatccgtagagaactgtttggattgtcaattatttataagggttcagcccactgtgggcagcaccattctctgggcaggtggtcttgggctgtataagaaagccacctaagcatgggcctgagagtgcgcagtaagccagcaagccgtgttcctcgtatagcctctgctgtgcttccttggctgcgagtgagttccttggttagagtaatgctgtatggaatagcaagtaggcctggccccaagttcctgcttaagtccatgccctgacttcagccaatggtggattgtgactgtaagctgaaataaactcacccctctcctaaactgctttgggtcagtgttttatcacagcaacagaatggagacaaggacagcttcttgtaggaatgcatataacgtatcttatctatagagcatataacgtatcttatctatagagccctcatagcagatgtaggcagcaaatttgatatgtgatatccttctgtgtgagtcccaattgctttctcatgtaacagatgagctgtctgcctttgacactctataggacaggctagtgtggacattactgacatctttacagtgccttctctcagcatttcgagaactaagcaattctggcaaaggggtgaaagaattcaatagtgtattcaaataaaaactgagaactcaagcaggcacattccagggggagacactgaaggaaactaggactagaccaggttaaaatgccattgtgaaggctgttctatcaacgtcacaccaagtcaccactccttcctgggtcagttagaaagctgaatgtagttgcttaaaaaacagacaatgacaccttccctctctgttgaattaatgacataaaaatgtaatactatttgggataaataaaataaaactaggactgggtagagattaattcttaaagtcagtggtcaaagctgaggggcagtgcccatacaaacttctgtcagatttgtacagtaagcaaacaagcaattggggaaagtctttgacagctatgggtcattctaaatcaagtggtgtttgcaattaatacccattggccaagataaatcagtttttttccaatggagtgttactggttgtatcaatcatactccagcctatgccccatgcccaggacacaaaactaatttcatattttgttttggttttgtcaggatgagatatttaattttgttttattttgtcattttggtcttattatgagggtttttatttgttttgaatttgagagagagagagagtaaaattgggtggatagaaaggtgggaagaaaaatctgggaggggttggagaataaaatatatgatcatatagtatataaaattaataacaatcatcaaaaaattaagaatgaattgaacagactaaaaacaggggtatggtgcatagccatgctcattatttagtgacccaattgcagtagcatgtgattaagtatgtaggtttgaaatgagcactgggttcacttttagtctgtgtcacttacttgtaatgtgtccttgactttcacctcctgatgccatagtctcaaaatatgaaactggaagggcagaagattgccatgagtataaaatgagaatgtaagcaaagttcttagtgtaagacgagggcgggagtcagcatccagtttcctgtagtagattccatggtttctgcccttggcagggaatgtgcagaaagtgatgtttccagccaaatttggtctcttctcacatgcaaaggcacaaaagagaaaaccagagcaagacttgatatggattcccttagcatgttattccctatcataaaattatacatggagccaataattctctgcaacttcaattgtcttgttgccgtatcttttcctaaactgtttcatgacaagttgcattcagcttaccagacccacttaggagaaaaaagcagttctcttgcacttatttggcaggctcccgtcagtctgttgaaaagacgggcatcagaagattttgtggatttgcttcctgttttccgttcccctttccaaccaagattgtgttctggagaaagattagccctgctatctctcttgcatgctgacagacttctcactcatggtttctggctgtaacttgtccccattccattggattttgtttccttgttgctggaattcatggcctctctggccagttatctgcaggtgacctcagtgatttctgctaagtgtaaatcatggcagggctgtctctccttcatggtgtgcatattgactctgataatctcaaaaatgcaagaagttcaaatataaagggttctcatagttaccttcccattattgaattaatattctaaaatagttactttatgtaaagaaaaggggttattgtggctttttaatatttttggtagctattttcttcagattaaaacactcaattaatacacaggaagtaagcaaaatttccaagtttcaggaagttcctgaagcttgtaggagtcacaaggccccaccccaaggtcatatgagcactatgatgaaaagaggccctccaggaagatgagctggaactttcataaaacatcacacatattgaggtggcatttcagtgatacagttacctttggattccatggttatgtaagtcatttcagaaaagtcactggctcactaagctagactaaggtggaatcaattctttggtctgccatcagtgccgtatcttggttgaataggcatttgctcacatctccccaggaaaaatcacacaacagttgggcccatggcagtgtatcatagcagtagtatgtgtcagagcaaaactattcacctccttccagagattaagagagtaggagatggtggaggaagaggctgggagcctataatgcccactgacttaaaacctctcactgacttcatcttttaaaggttctattcccttccaatagtaagaacctggaaacatgccttcaacacacaagcactaggtagccattccaggtacaaactacagcaaagaatgatcaaaaatatcagcaaataattttcaagagttccatgttattgtgtcaatgaaattcaagttagagcatcattaaagataaccctaagaaccctgggggataatcacattaggattctgacagatgggtagatagcagataagcaattattcacatgggtaacaattaaaacaggagaaacatcacaatctctgtattattgtgttaaatctgacacattcctacatgtccatttacaataaagagattaaaattcagagtttattatctcattttcaaactggaaattatacattgtaactccaagaccaggccaagagtatgctcagttatttttttttttttttttttagttttgaaggtggcctaggcatctatcttagtccacagaaatacttgagctgcatctggtgattggtgtttcttttccagagaagatctttttactttatctcaaacaactctaaagatcagtttcatacttacaatgaactgactcttcagccacttggagtcacctcccaaaccaggatgcatgccccaattctggcaacaagtattttcaatagtttaaaatgctatgtcatctgggaactgttgatttagcgtttatcgtccgtgtcattaaccttagcatctcatcataagcttatgatagtcatagctttactagagtctgtccatttataaaaataccagctcccttaagttggagttcatggtttcttggaattttgactctccatgatatctgccaacctctcattgttcatcagaaactcagtacagatttgtcaagtagagattttgacttctagctcagtagacccaactcttgctctctcagctaggattatccaaatgtgcagccttgttttccttgaaggccttatctccatatggaaaatttcctcccataccttaccctgctcgccccaagcccaggctgagtgatgagaccctgaagttatgctacatttgtctgctttcctggctagattaggctggggggacatttaaccttgttttatttatttttcaatcttgtgttgctatggcctagcacacatcaattgttaaaatgaatgctttcagaaaaaaaagtaggagtgccttgaacataattagagaagatatattaaaagagggaaatgacagatacttaatatgcctcttccaactttgtatatcaatttaatactttatataacttggaacctatccatcagtctgacatgttgtgaggcagtcttggttcatgatagattaactaattcttcatctattatttatactctgcctgtattagaaaaatgtcattagagcagcgcaaagcaaaaaacaaaggccacaaaaataacatcattaaacaggggtaccaaaagcagaacttcacaatcagtatgaaggaagaagtcattggttcagaaaacctcaaatcaaagaaagcttgagttcctaaacagaaaaattagctctctgagccaaatgcagaggcacatgcctgtaagtccagcacgtaggggcatgaaggcaggatgatcaggagttcaaggccagcctggactaccagaaaccctgtcttaaaaatataaacaaacaaataaatgaacaaacaaacaaaattacctctgggtttttggaatctgttaccaggagatatgaatttacctcctcttttcacaagtgctgtgatatgtgcagagctaccaataatgacttgggcaagcattgagacactgtaattgggttacattgtttaagtggtttactgtaggaacaattactccatgtgtcaagaacgttgatgttctgaggagtcagcaggtccctgtttagcacagatggtggatgtcagagatgctcagattgctttatgacattaattctgcattgtttctctcaataacaaaaggcttttggagcagaagagtgagcccaggcaccactcactgtggagggtgtgcacgtgcagtaactatgcaccattgcaccattttcatgccattaagagtagacaccagtttcaaggatctacagatgcataagaatatagtccagtcagatatttccttcctcattgttgagtcggacacactttattctgggcgccatgttaaatatgcagatcatcctaggttctgctgtagcttgcatgctgaatatgccataaaagcctgtgtatcacagttttctacccagcctggtgctatcggaaggaataaaccctttagaaggtgatgtttaaccagtgatcttaggtaactgtaagtgtacccttggaaggtattgtgtgacaagtgatgtaagttgtttcactctgacctttagtcccaactctcaccaccccaaactcccacttgaaacccaaaataatggagctccttgatcacgaactataactataaaacttcagccaaaacacatcttttcccttttaaattaatttcttaggtattttgttatagtaatcaaaacataataaataattaaaatgaaatttaggctgtcaggggaaatacctttgaagtactcaattaatgtttcaggattatttaaccataactcccaggctatgggcacaaagaccaaatggagtggcagtttactcaattgtctgataatccatccatctacacatctaacatccaggagttaggagaaatgaaatgttgtgcttcttactggaaactttgaggcatgctgaattacctggttaactctttcaattacctactttatgtatttattgtttcctagggaggcattgttgcatttcctgttcaagctggtgaccacacattggcaacttgacagactgactaagcaaagcaactcacttgagtctccacagctggtaccatgtccattgaggtaggcaaatctcagaacattcccgtgccatgtgacttggttcttcttgtgtagataagattgtaagctccacagcattgtagaaagttgctgtccctgggtctcaccttggaacttagatgctgttacaataatccttacctctctctaagtcaccattgaggcattccacccagcagaattaatgggtgtgaaaaggcacttggaatggagcccctataacagtcatagcgcttcatcatcccttgtgtctttgaatatctgtttcctcatttgtagcatgagtttgaaatgcatctccccagttcattattgcaaatgtgatttccaatgcaatggtatgggaggttgcccaccgagaggtgggtagattgtatgtagggtaaaaccatcacaaatagaataggctagttattattaaaaggaggtacaacagcaactctaccccatgggttttatcctttgtacagaatttcacctcctgttccaatgcaactcgaaatccctcttcatatgtgacctgtacatcctacagaaccaagtgctaaataaactttgtctattcataaatcacatagtatgcactgttctaacaccagaaagcagattcttatatgccgggataattgtgtttaccttgtagaatttttgtgagaattaaatgagaaaatgccttcaaagaccagccaacacaggagcgtggcacagactcccaagagggaactaactgttagtttacaataggttgaaggtagacagacctactttattagtaatttaacctcttttagaaatttattttctaccaaccaatagtaactttttaagtaaagacaataatgcaaaataaaacataattctcagagagtatgaatgcctgtgtatacatttagaaaacattttgaaactggggacattttatttttgttcaaataggagtgcttcattttaattttctactgaaataagcttataattaacatctattttgagaagcaatgccattttacctgttacatatgttctttgataacaaagaagagagtcattcttgggccagtgtatcagcacagacttgcatagtataaaaataattatgatttatcagggaagatctaattattgaaattttttattcattagtggtaagcctctgacaaaacccagtaatacatgatgaaaatacacatgtaaaaaaatataatgtaccatcattgagaagtgggctgaaaagatgactccatgggtagaggacttgccacacaaccatgaggacctgagtttcgatgcccagcacccagatcaaaaaccggctgtgggaagtttgcataggtattccagctttaggagaacaatatagaggtggatcccatgggctcactggccaggtagtctaaacaaactagtaaactctgggctcaatggagagcaattttgaaagaaacccaatgtcaacttttgggcttcatatacacatattcgtgtactcccacacacatgtgcaatatgtactaagaaataatcacatgaggagttttcaactgaaatgatgggggaaagaatctttaagtcagtgaatttgccttttacatctcgcattgtgacttattggacaatggatttgagcagattatttaatgtccatgaactttagtttcctgcctccgccctgtgggggggggtatgtagagctgatagcaaatagcaagagtgacttcaggtcatttgtctgtcccctggaagggatatgataaatggagtaagcacatggcacagatatagagagtatggatttatcaggtatcgccaaagtagtgagggctttcccaaggtagatattcagttacttctcaaccctttgggtcttaggtttcatgcccatgcccatcgtcattaacacatcatagtcaaggacacctctgggtttgaaatgaatagataagtgttttacttgctattccatgtgattttaaagcatagaagcacaggtagtcactaagataaagtactcctagaataaatacaaatatcagcaggtttgtggtccaatgcagtttctgcattagactgttgcaattactcaagtggtacaactgttgaagagaaaggtcactgacattgcaataatgcagagagagcaccctggtgcctggaggttctaagcacagtaagagctctgtagttcatgtagtattttctcatcctgttcccctggcaaccatggagtgagcaacagttagtcctctagagtgcagttttaaatacgagttcctcaaaggcccatgttgcttaaaggcttgggcctccctcggcctctggcaacattagaagtggtggaagctttaggaaatggaggtctgtggaaagtattctggtgtttagggggatgccattaaaggagatgtggggggctcagctgctgcttctttcttgctttgcctccttactgggaggcaaacagcttgccatctgctatgactccctgcttcccagcaggcccccagcaatgaaggcatcaatcatggactgagccctccaactctgaacccagtcaagccttccctctcttcaaatgttgactacctcaggtatttcttacagtaacagaaagttgaccaatacagccctgtttactttatgaacatgaaactaatgaaaaccaaataaaaactaaggaagttataactgagaatttaaaggaggtggttctaaaatctgaatattttatgtatttgtttgtttgcttgtttgtttcttgcttgtgcatgggggtagggtcccgtggtgggcctgtggaggcagaggacagctttcaggacttgactagctccttcttccatgtgtagctcagggactgaactcaagttgtcaagcttggtgcaagtgcccttatacattgagccatctagcggcccctgaactctgactattgtaattttgcattctctcaaagacaaagaagcaaaaagtggattatggtggcttgacattcatcagtctattctctgtggtggtttattgtgtgattattgccattaaggcactatcagcggagtaaaggatcatgctccagctcgcaagaagccagtaggatagtaggatcaactatgtatactacttacacagaccaaagagccatggaaatgttcaggaataagtgttctggaagtaatttgtgagttccataatgttaatcctattttaatattctgtccagtgctacaatctatatctaactggtcatcttcagaaatacttttcttccttccagtcattggaatcaagttcagtttgatatagtgttcttttgaacatcaactgagtccattttatgcctggtaagctatgcctatgaggattagcatgaagcaccggaaactcatgctttgcctggtagtttttttaacacagcagacgttatctgtgagttggtaacaatgctcaattcagtagtttacagtcacatatatgtagggagaaatctacactgcctttgcagtcttgaaaaattggagataatagaaactctcatagtactttcacctataaaagcataatttaaaaaaattgactgaactaaaaaaaatctggtttgaccaggaaactatttgcttaatttttttgtggtaagacacttcattattcctctgaattgactacctatcacacgtcaaggtgtgggaattacatattatctccatcatcaacccagagagtaatagatagttgttttctttgcagaaaggcaatcagcttgtatccattgtgtctaattgtatccatttaaactgtgcatttatacttagaacttgtaatagtaaaacctgagatacgatgaataatatgatagattattatagtataaagtggaaaatactatacaacggaatgtagataattctcagtctagtattgtagagattggagccaagaccttgtcttgctaggcaaacagttgaccaatggactataaacttagcctccacacttttttaagcctggctcaagcgcttttgttaggaagtgtggtttctccttcagcctcagatccctcactggaaaatgggcttcgtaatgtttatcttgcagaactggcagtaaggtttactgataactcataggtcactctgttagtttagatgccaagactgaaaactgtgtatttgtattctgttgcttcttcctcacgtggacttcccacgggattctatttcagctactatttttgcatagcatttggagaggcagtgtgagccagggcctggtcatgcaaagtctggattctacctctagatacaccccaccccaagctaatctaataaaatgggagctctgaataaatacaagacccttgtctccactaggaatgtcgttctgtgaagccatcatctgagcaagaatgttaggggttggagtgtgtgggggactgccaagggctagagaagtttgccctctgaagctttttcaacaccccccgcccccggggtgcttcccaaatttatgttgactttccaggcttttaaaagaacctcgcaaatccttaagactagttaaagttccgttttctgattgaaacaacaaaccaaaaatgttttcagccatcgactaagggagagcgaaagataaggaatttaagattcaattattaactcgctaccctgatatacaggcttgtttgctttggactgggtttgggagtaaagctcttatgagcctagaacagcacagagaactgagcaggaacccgggacagagtccaagcaagagctgtaaattggtgctgggtctcctctccaggtgtcacaggtcctgacagcctccaggaacctgattctagggggaccccgagatctgaggagtggcaggtccaacaagctggacagtagagggctgccctcgcaggtggagagacatacttcgcgacatccccagaagaagtacagtgcaagattcgcaaaaatgcatgtcctccaaatcattttctgggggcattctcagccaagtcccctggggtgagatgtctgggctcctagggtgggaagttggtgaactttctgagcgagccgagggtaaatagtaggaacacaacgaactagagcgatgcggagcagaggtggtggcttcccagagtgcggtccccggagccttgcccgcagtcgtgtgcggaaggcgctcacttccccagccgcccggtggtttgccagcgagaacccgcgcgggcgagggcaagggcgaggcaaggcgggctggggagaggcgcgcacggagggcggcggccggactcagcgctcgcctcgggcggctcctcactgcatcaacctgcgggcttcggcttggccgccgggcccctcccaccgcaccccacccccgccgtccgcccgcccgccccggggcccgggttccagttggtgcggagcagccgcgagcggagctcccgcccgggaccgcagcggcaggcgacgtcgcggccacctccgctgcaccctcacttctgccacttgggagcaggcatccactcttccttctccgtctccctttgtccggtcccccacccgtcccccatctcttctcccatcccctgccctgcacccccccccgcccccgtcctctccccgtgtcccccgctcctgtgcctctagccagctggctgcgcacaccccgggcgatcggcaccggtgctttccgagggcgagctgtaccccgtgctccccgctctctccttcagctccgtctcaccgcgcccctggcctctctctcgccagcggcgccctgctcccatcccgagtgggttgcgcgccgggccgccgcctggtcatgtcagaatggagatccggcagcacgagtggctctcggcctccccccacgagggcttcgagcagatgaggttgaaaagccgccccaaggagccctcgcccagcctgacccgagtgggcgcgaacttctacagcagtgtcaagcagcaggactacagcgccagcgtctggctccggagaaaagataagctggaacacgtaaggaccactggttccccgggggctaagtggtcggagcacgccgcactaggagtgtagggactctagtggggaccccaggccaggttgcctgtatcctctgtcaaccctgtacatttttgcctaatggctcaattgcgtggagaaaagaaaggttcgctttcaggcaccccagttcgagcattctgggggacctcctgactggtccctcactgttcatgtgcagtgtgttattggggtacctgtgagaagagtggttgattgcaagggactgggctttgcacaaggaaggtttcagagggatgtttgcctgggtctttggagccctttcactcagtgcagaaactacaaaaacgctgcaataaagttgtcgctggtgatccagagcttttggcagtgtatgatgggatgctaacaggagtttttagagagctttcccacctaaacccaaatggaaagtgattctgagctgacaagggtcagaccaaaggtccccagctatctgcgactcctcagcaaagtgggaaccagtggatgtgcattgcccttccccttttctctcctgggtgaggacttgtgtctttggctcaagtgttgaatccctaggactgggcattctagaaagaaaagcccttccacaaggaccttttgggaatccacacttaaaaatctgacccttcagtatgtccttaagcaaatgttgaaattaggagtgtgccagcagcaggaaaagaacctctgctaccctacagaatccaaactgagtctgttaatgaaacgtggaagtttcctagtatttgggtcaccccgtcaaaaagataaagacaggaaactcgactctcccagcgctgtgcccacctgaatcccgtgtgagcccccaaagtctttcctgagctttgcccaccaacagtgtccctggaaagaagagtggaagtgggtatttctgttagaagccgaaaggactgcgcgtgtctttttttgaggacctgattaagtcacatgaatgactaattctaaagcccttatttaaagatcctatttgagttgagtaataggctctgtttggtgtggagagagtcaaaaggatgtcctggaggggaggttgttgaagggatttcgagggctgtcgtgcttgttggatgtttgaaaggtaaaagcgatacctgtttaaaaatgcccactctagggtgatgcttgcagggatcagtaatggagaggatagacaggaagaagtagcatctccacttagctctggacgctcatgagaaaactagccccagcctcaggcctcagagtggtgatggaacatgcttcatttttgtttcgtcataactgtgcatttgcagtggttgctttaggctggcccatttcttttatacttttaccgaaaatcaatagtgcaacctcctgtgagcatgtcatcccgagtcccagctgctgctgcatgcattatacggaaatgctatcccacggtttgatttacattggaagtattagggctacctagtggaccacagcagcttcacctctgctttaagtgtgggatgctcggctctcctgaggaggagagatgaagcgaagggaggtctggttatgctttacaagtatgtgagcatctgtgctttccctcactcagatgccctaaagagcattgcattcattaaaaaaaaaaaatcatgtgccccatttgatgctgaaattagagcctcatttgttttgcttttaaaactatgtttatatgagatgtgggttctaccttctatatttaccttgaattagaaacagagcttttgtttcaaatgatttttgatttactctctgacccctttgaaatactaacatcctgatgaattagtgtttatgagcatgttatgaaaagttgaagtcatatacagatacaaattatatttgaattcaagcactcggtagttatatgtcctgttttgtatgctatgatgtttacgcagattgctgctaatttataatacagtatgcgaggtttaaaggcccaaaacaaatgtaacctggcatatagttgctgcataaatcctgagaatatcatattaagttcattataaacagcacactgatgctatgtggcaccatctagtttagatgttgcaaggagcaagttgtgggtgtcatagaaagccaaggatgacttaaaaaccactcctctgctctgtctaatcaaaaggatggccacagtttttattatgttgaaataaatgaagaaataagtatgatggagatcatacatctgaaaacagcttattcagttgtttggtgctttgaacaccaatttaaatattaagggaataaataaattatgacttccaatgacacatacattttgtcatcacaagtaacggaattccccgagatggaatgtggcagtatgtggattctagccaggctttagaggcacagcttactctgaaagtcaataacacggtgtaaagtgacagctaaataatatatttctacccactttgctaaaagtgagagtaatttatctctttcttgggctgagagacatcagatggatctcaggctatgcaaaaagaaagtgacatgagttgtattggaatactttcaattgatcttaaacttgattcctatcagtagttagttgatatctgaaatgaagatttgtaagtacataaacggctgtgacggtgcatgcctataatcccagcactggggtgctgaagcagggacagcctgggccgactggtgggttctgaatcaatgagggccacagagtgagaataaatacctggccagacatatgtcgtgtgtctgtgataccagccttcaggatgccgaagcaacgggagctgtagtccaaagccagtctgggctacaaaacaagatgctgtctcaaaagactgactgaaccaactgaaagacagacataaatgtagggaattttcttaatcctaaatcacaattagaatgttcgagaaggtaatgtgtatcctgaactctgaacttcaaactcagcttgtgcatttgaggaaagtgaaatttttggttgcatgcagaatattgtctttcttatgagtctctcttggtgcagagagcagtggtcctcagccttcctaatgctgtgaccctttgatacagtaattttgctactgttatgaaccataatgtaaatatctgatatttgggatatctgatatgagaccctacaaagaagtcacaacccacagcttgagaaccactatcttagagtatgcatcctgttctgttctagaattcctaaggctttagagactagagggcttgtaaaggaatgtcagtcttacttgttgtaggattctagtattttcttgagggatgatatataaaggattgtggttcagtaaagcaagctgggcaagagacacctctagaatctccctaggttgggtctctttgaagctcttgatcttctcaggggacagtctgacatttagtgtcattggtactatatgctgttattgaagtttttgctatatttttctgttggaaagagggtgaaataagtctgctctttccacttttcagtttcgtgccagctgtgtgagtttccaggttacatgctttcttccctgtgtactccactgggtcttgctaaaatggttgtaagtaaaggctctagttagaaaaacctgaatttggattttacttcattttcagtaaatgaggcaattacaggtgaagggcttaaagtatgtagggtatacaatcacatttaaaaggtcatggttttgcaatggtgattaaatgggatattctctgtctgtatttcaggaacaaatatcctaatatgtatcagtcagatgtttacatcaccctcctcatctgcacaggctggtagggattctactcctccgagtcttcctgattgatggaaggaaacgccaatcctagcgctcattgcccctattgccatgacagcttacaagtactagagatggctcctgaagcgtctacccacaagtgatgcatctgtaaagccaatatctattaaccaaagaaagtttcatggccaagtttcacttgaatgggatgagaaagagggcccaacccacaccagatgtacagcactatagaatgtaaagcactcagtgtaatgttaggactgtactagaagaccaatagtgcacctaaggtaaaatgacttcttcagtcttcccttatctctacctgagcaccgccacgcctcccacgtttcacattaacatcagcttccctgtgccctagacccaaagcatatggacctttgggccaccaagatgtttctagtctttggttttccagaagtgtgactcttcctggacagtggctcttttgcttagcccctgcctggtcactctcatctgatttctttgtttatcatgatctctgctggccaaagcaagcaaagccagctcattacagatatctcacatccttgtttccttcttggcttgagctgatgagatgaagttgcaagattagtcacagaatctctttaaactgtaaggagaaataaagagtggagattggtttaagagtaaatgacaggaggctggaaggatggctccgttggtagagtacttcctgtacaaacatgagggcccaagtttgtgtctctagcatccacataaaagcccagagatgcagtatgtgtctggaactccagagcagagatagatggagacaggcagattcctggaactccctggccatccagtctagtgtaccatgctcactaaatgtctctctcaaaaagaaaaaaaaaagagagagacacacagcaaagcactgagccgaattcctggaatccagttgttagagagggaggagtgatgagcaaaggggtcaagaccatgctggggaaatccacagaaacagctgacctgaacaacagggatctcatggaccccagcctgacagcttggaaaccagcatagggcagaaccagcccccctgcacttgggtgtcagttaggtagcctgggcagtctatggggcccctggtgatggaatagcatttatccctagtatacgaatggacattgggagcctattccccatagagggatactctcttagcctagacacatgggagagggcctaggccctgccctaaatgatgtgacagactttaatgatcctccatagaaggcctcaccctttctatggagtagaagagggatagggcgggagtgggagggaggcatgggaggatgggagggagagggagctgggattgacatgtaaaataagattgtttctaatttaaataagaaaaaggtttacgatgaccaaagaaaatacctgacattaatatctggccacatgcatgcactcccctgactcacatgtatgcatacacacaagcatacacacacacacacacacacacacacacacacacacacacacacactcacacaaagaataaaagacaattcttgatgttctcacttatagttaacattgtatttgttctagtatcttaactaaataaaaagatgttttctctaagtgtattttacaccgctttgtttgtgttatcagcaaatagtaaataaatgtcacgttcacacttgcctcctgcaatgaattattcacatgatgagcaaagaataagagcgagattggccactgtggtgtaggcttgtgttacataataccatttatgtccacagagctcacccatgagagtcctgtgccccactgagcagatcagcaaagcagggagacacacagctcaacatgagggaatgaatctttaaaatgccccattaaaaatcaaccagacagacagactggtcaacaagtaagtacaataatgttcaccaggattagttcctgtgattttagataaacacaagggacagtctgagcataggctatgttctctgcctctctaactcatccatcgagaaaggcactttaggtgtctcatgggtgccttctaatggatatcagtgggcccatattgtccttgtccctaccacagttaacatatattttgcactaatgggcttctttccccaaggatcaacatgacagcatgttttgaagacatcttgttttctctgaactctactgggtgtggcttactattgatttttgagtttaatcatggtccttgttgtatcacattgagtttgagaagcccaagatgactaaattgaaggtttgtcctctcacctatgtagccatcaaatagctatttctggcccttgtttctcaaagttttcccctttctttacagacttctatgtctatatcaggcatacatctgtagaacagtttttaatgtttctgtttaagctctcagattcaagaaagcagatgatggttccaggatctaggacatgacagtagcaacagtatgttctcaagctgaattgatgggtgggagctatacaggcatatacaaggactgcatggcaaaatctcaccccagaaatattgcctaaactggtaacatcaaagtgagttacctggcgttcatacctttgcaagttgtgctatgaaatcttaagatgcaacataaatatcactaactataagtctttactccaaagctgcccaagtcctgccaccacatggacactttccgccaggctgcccaagttccacccaccaccacgttaaggtcccaagtaacgcacagagacttatattaggtacaaatgctgcttggccaatggctagggtttctcatctgctagctcagtcttaattatcataaatctatatattttatgacttatcttatagaagtcaccttctgctggtgctctctcttgccagcagatcacatggtgactccagagcagagaccaggaggaagagagaagggaaaaggggacgacttccttcttgcccttgcttatatatgagtctccctgctatgcatagtagagatgccaacctgtcatgcttaaggaaacaggccttctaaatgaagggtatataatcactcattccttccttcatccttctctccctcctctttattctttcccctctctctcctccccttcctcctctctcccctcctcatattctctctggtttcttatatagtcctgctgtcctggaagtctcagtgtagtccaacttgcaagtaattcaaccatctctgcctctcttgttcaggggttgcttatgtgtcaccatacccaacttttaaatttttctttaaacacagaaagaagagttaagttttaaaaatcacaattctagcccttaataagaatttacatgcagaccatgcaaattgtcttcagtagccttacctttattagaaagtgcaattttgactggcctgtgtatgaagtccaaatcatgaaatagatgccatgaccattggatgataaatgtgcttcttcattttccagtgattgttgtgaacaaagtatttgcctgcaatgagctgtgaccattgtccttctccaagtatgttgtgagattagatccagaagaggcctgaagagttaggctgggaaggtggtacccactgacacaaaaccaccactagcaatgtcatctatggaggcatagttgttgagagtgtcttttatgtgaaaaacactgttaggagactgtgagagtctcagttcgacaagcattatctgacatatgaacttgtcaaacttggatgatatacaaaggctagactagggttcctttttgcaagatgtttacagtcttataagcacagttacaatataattatagttgtaaataataaagaaaagcaaaacagtttaacacttggttttcaagagtctcattgtttagaatggagtaaattacagttagaaataagtaatgaaggcctgaaggccaggcatcagcagtggttcacacctttaatcccagcacttgggaggcaggaacaggcagatctttgtgagttcgaggccagcttggtctccagagcgagttccaggacaggctccaaagctttagagaaaccctgtcttgaaaaacaaaacaaaacaaaaaagtaatgaatgctgttatgtattgataatataacacaacaaatgttcattccaataatacagtttatacacaaattttaattaataatgtaatttaccacattagcagactaacagaaccaaactctgtagataggcttggtgtctgtgatgattggttttatttcttaacttgacacagtctagaatcacatgggaagagagtctcaatgaggaaccatgatgacttgtgggatgtctgtgggagattgtcttgattatgttaattcaagtgtgggcagtaccgttttccagatttggaccttagactgtgtaagagcagagcaagtagcaatgataaagagaagcatgcatgcattcatttttctctgctctgtgtgtgaatgcacagtgactggttgtttcaggttcctgatttcttgaccccctaacaataacaggtgaagaaaaagcgaagtatttgatgataaaagtctcagccagaaataaaaacaacctttattactctgataatggatttctttaaaaagaatcacataaaggaaataaaattgttattattgttagatgatgtgattgtccacatttggaaacctaagataaatttagatattctacatgaattaataattttactggatttgacaggtaacacaatcagataagaaaaaaagatgtttaaaaatgagaatttaaaaggaagttattggttatcagaagccagagtaactatgaatattaaaagattcaaggtaaacaatagatctatttgataaattaatattgcccttggacttgttagactcactggataaaaaaaaaagttgtcttgtaaaattaaatattagaaataattccaaagtaaagttaaacttgatatcatttacatgatcataaaataataaatactaggaatgtctaataaaaaaagttctttaattctttaccagatgcaattcctattaaaatctcagcaagtttgtctgtatatgcatgcacactgaatatgaatctggaatctatatggaaagcagaggttcaagaacaaacaaggcagtgggtgaagtatgaagaagactagctgtgaacatcaacacttacaataaagaattcactaagtctgggctgtggctctgtgaatgagaatgacttccaaggctcacgtgtttgaatgcctgttccccagttggtggcgctatttggtggaagtttaggaggagtggccttgttagaggaagtgagttactagagggctttgagattttaaagactggacattgccactttctgtcactgcttagtgattgtggctcagtgtgtgagctctcaccttacagtttctgctgccatgcctatctctttcctccattcctctgctttgccatcacggactcttatccctttagaaccgaaatgaactcttctctaagttgacttggttatagtattttatcacaacaacagaaaaatagctaatatgactgtggtcctggcacaaggatgaacaaatagatcaattgataggtatgaaagtataggaacagacctatatacattacaaaatgtgtctgggtttgtctttcaaatcatcaacaactgtcaatttaatgtgagttacagtcttaaattataaattgaagcatcaataagtaataaaaatctttattaacttggaccaagaaaaaaaacttaagtatttttaatgatctcagcttattaagatgaatgaaccagagcacagtgaaacaatcattttgtctctagaagattacatttagagggtgaaggcaagttacaaactggaatgccatactttcaacttatactctatatacccctcaaagagctgaacttaaaatgattgacagtatccaaaatgttcatgaaaataaagatcatccatacctcaataactagtaatactttaattcatagagccatgataaaagactgctaaattaagcatatgtatatcttgtgacccagtgagtagaattctatatgtgtcttaactgtgtgcttgtgtacaccaaggaggtacaaaaatagttactaaagcattaacttagtagcacctaaaaactgcatccaaaacatccaaccataactgagagggcaatttaatttattcatgtgaaaagaaatgacacatgtatgtctattgcatatgggcgtgctagagtagattcctcatttagacacagttgtgctgaagaagagaagccaggtatggacagcaggattccattcctaaggacaagcaagcaaggctcagttagggagatggaatgttaatgactacctttgaggctgaggtgagcctaaagggaggattctgtggagtgttctctgtgttttgaatagtggttatgaactgaaccttgtgggggtgtacactaaagtcctgcatactctctagcataatgtttcaataacagttcaaagaaagggaagtgaaatctatagatcccatgctttcttctccttcctgtctccaatctgttggcatgggccaccatggacgcctgcttgcatttccttcctatgactcgttacttggtctttccctcatctcacttcagcttgctgtgctaccctgtatacagtttatagtatatttgagttgagtgtttgtttaccatgtctacccgaaggcactagtaaattcttaagaagctctcttcaggagctcggtgaattgtaacctgaatgaagagaccttctatgcttgttaccttgtgtcaacttgacaaaaactagaaccacttggcaagaatgacactcaaccgaaaagttgcccattttggattggcccgtggctgtgtttgtgggccattttttcaattgctgattgatgtagatgggcccaagacaccatgagttgtgctatccccagacgagcagaactgggatgtctaacaaaggcagctgagcaagccaggtaaggcacttctgatatgtaaacagtcttccatggcttctgcttcagtccctgccttcaagtccgtgccttgacttctgctgctgatggactatttattagttactctagttctctagagggacagaaccaatgctgtgtgcgggtgttcaagaatttataaaattagcttatgtaaacatagtaaaacaaacagctgaatcacacctagaacactgagaacctgatagttcttcaatccttgaggctggctgcctcagcagttggagtagtcctacaggggcctgtctctcactggagagttgagaagcccagtagctgtatagcttataaggctggccacctcagcagttctaatctggcattgaaaaactagagggttcctggagagttcctgatccttagtccaagatggaagcctggaagcattggttctgaaatcagtgaaggaattagcagcaacagggtgaatcaactcaggcaagaaggaagaccaagaaaggaacaggccagtgaccttgcttttctatctggactgctttatgagggtacttgggactgagaaagtggtattcaatctcttacaaatctatatgggaattgctgaagaaatggcaagaagattttggaagagttaaataaagaggcccagagacaaggcaatttcctgactccactatagtgggaaattaccaatacggagtcagtagaaatataagggtatttaatagggaaaagccttacttacagagtgacctagccagccggcgtggcagcagtctgtacacaagcccaaaagagaaaccgaaagcaaaaacgcagtcaccctatgtcccctgatcatgccctcgcaagcttgtgagggcgtggtcaggcacacctgtagccagcccctaagtaggcatggctacagcttcccctacaattccccttttagtctaaaagagattaaaacttaatagtttaaagtatccaaaattaacaggctggctacaggttcccctacactccactgtttgcaaactcttttcatcctcccaaatcttgctttagcccatgatgtgcacacattgcaaaaagacttgttctataattaagagaaagtaagttttagatttatgaaggatttgtaaagacaatgaagccttttctgtatgtgcctcagttgttttagtttcctccagtgctgcctcttcaattccaggctgtttggattccacgagtgcttttgtatgcatgtaggtgtgtgtgtgtgtgtgtgtgtgtgtgtgtgtgtgtgtgtgtgtgtgtgtgtgtgagagagagagagagagagaaagagagagagagagagagagagacagagacagagagagagagagagagagagagagagagagagagagagagaaagcatgcttatgtgtgtgtttgtgtacccacgtgcgtgtgtgtgagtgtggaggtaagaggtcaatcccaagagtcattcctcaggctttgtctacccatttttagatactgaagtctctcacggacctgaaactcaccgcgaagactagttggccagggagccctggggtatgtctgtctctacctccccagtgcaaagattaagagagcatgccaccatacatagcttttcattttatttatttatttatttatttatttatttacttatttattttagttaatgtgggttctaaggattggattctggccatcatgtttgcaaggaaaacactttacgtgggccctttcccagctcctcatcagtgctttgggggatatcccttttttgtgtggcagagtcctatccaggatgctacattgcctagaacatataattgatggtaaacttgtaaaatcctaagtgaaactgcatgcttcagaagaactgttctgactgtatagaaattaaagttttagattgggtaaatgtttgtttaagggctgccttaatctagctgcatgatgtcttttattggtgagtccattacaatgaaataattttatattgacaataaattcagatacagcctcgattataacccttacctgtgcaatcctgttcatattatgaaaagaaaccaatagcagacatgccaagtgacacagtgactttatggtgtatcacaaagtgtgtgtgtgtgtgtgtgtgtgtgtgtgtgtgtgtgtgtgtgtgtgtgcacatgtactcatgtgcatgtgtataaatatgccgggatgtgcatggaagtatttttatatttttctgctgtcagaacataaaaatctacccttgagaatttattttttgcagccttgaggaataaacccttgtgtgtgcatggcaaggactctaccgctgagctataatctctagccttatgttgggaattaatatcctcattcataatttcctgattccaaatttgacatcactctttgggcctcctttttaatacttagactgcttggccactgaatagaaagggggtcttcagtgattgtgtgctttgttagtggtggtggtggtgattttcttctgtatgttttgttgtctgagctttgaaattctcttcaaaaactaaactcggaaactgttcaatcccaatattctcatgccaagagagtatctctaaagaccaagaaaagataggacaaaaagtggaagaactatggtgaaataggcattgaaccgcttgtgtcttgtaccctaggacagacactgactcttggtggggtgttgcagaagaagaaaaccatgaagaatggcttttgtgtccagtgtcccacctggttgtaggatgcttgtcttccattctgtcctgcctataaaaatggcagaacagacaattcctgtggccttgcagaaagcagatgtgaagagtgggttttcctaccctgcccattttgtttattacggagcatagatgaattggaagcccatcgtctaggtgggaggaaaatgaggagactgcaggtgcccacggcccatactgtaggacttcagcatcgagctaggtgccaggacacatccaaaacaggcagccagtggtgctctggggcttctccatggttgcccctcttattttgtgagactattgtttctctctggatgagtcataccagtggagttttgactaggtttagaatgagtgtcacagagttggtaaggaaaccaaagaaagataattgacatgcctgaacaaaatgtaaatggtaaaaagaccacattcaaacaaagggcttgcagatagcggtgaaccagtgggtatggataacctaattgccttcatttagtccttatttctttcctgtgttctaatggtgggagggaggggtgagtgctcaccaacatatcaaggaacctctgggcttctgactacaggcttcaaaatattcctgatctttttactcaagtacttaatttttgtggtattaaaatatattcctttagccgggcattggtggcgcatgcctttaatcccagcactcgggaggcagaagcaggcagatctctgtgagtttgagaccagcctggtctacaagagttagttccaagacagcctccaaagccacagagaaaccctgccttggaaaaacaaaacaaaacaaaacaaaacaaaacacacaaaaaattcctttagcttagaaacaaggcagctattggctagatggtatttgtgtaagattgtagttcagtattagaaaaaaagtgattaaacatgtcttccttgataaaattatttaaaaaggaaaagttgaatgtctttcatggagagagaaagtaattcccataatcattaattaaatttaattcccactaaaacaagccagtcagtgccagcacctgctctgagagtcttgtctgcatgtttctacattgaagtaaagataaatgctttcagataaatcactgagttgtagttcaagctattaacatagaaagacttttggatttgtattgttgtagccaataggcttattcaaacagaaaggagacctaatttaattattgccacacataatttcaagattagtcatctagtttgaaggtaccctgggtacgtagatttagcctggccttagtatttacttctgtaataatccgaaaggtatagacactcacatggagaatatgacactttattgcctgtcactgtcactgtaacaactaactaagtgtctctccagtgatgctgactagttctttcctgaacacaggcccagaaaagctgcctttgcatgtaggtggtaggaaggtgcaggcctcagccactgataagacatctaagatctgtattcctgtcccaaaattttatagtttgttgcctgtgaaaaacctagactaacccctctgtcattctaaccttttacattttattcaagtctttaattaagtactcatcatacatttagtttggagacagggcctgattctgtagccaagactgtgttagaactcgttactcctgcctcaacctcctgaaatctgggactgcaggcaggcatcactctacccagtttacagaattttaaaatcaggaacaaaactttgagtgttaagattcgtagtgatcagggatcaaaagaatcttaagattctagctttgccaaggcttactctccaaattcccatggttggatggagaaatgaggaggactgtgcaagctcaggaaatgggcctttgataagggtaatgtatcctgctgcccacagggctgtgcgaccttctatggccatctctgcttctattgaacacgatggctacactggtgcaaccttcattattattattatttggttttttaagacagggtttctctgtgtagctttggaggctgtcctggaactcactctgtagatccgcctgcctctgcctccccagtgctgggattaaaggcgtgtgccaccaacgcctagtgccaccttcattcttgccatgctgttatgctgtttggttgttgtttctccctctgcagactgggcactgaattcattctgctaactgctgtcgtcgtcgtcgtcgtcgtcttaacagtcttgctctcttcaaagatgtttggattttctagcaatgttgctttacagaacctgtgggatcttctgtggaaattgacttctctccctagatccccacccccttcttagcacagatcactttgcagagacggtggaaccaagagacaggaaatacatctttctcaaaagtggctctcaagtgccaggaacacatcttgacttttttctcctttcagggacaatttcttcttgggaagatcatattcttcatgtttctgcccttaacccttcctcaggggtgtcagttccttgggatccatctgtacataatgcttcatgcctctacctagtgagttcatcttctttgttgcctggaagcttgatgggcagcaaaggtgggtggctcaggaaagggaaggcatcacaaagaggtctcacatcctgaaactccatagtgggcatgagccgccatgcagtttaatgtctctaggctctagactactaagatatctattccctctttactgcatcggtttgccattatacagtgaggggatgattaacctgccaaagaaagcattgagacaccagtgctgcctcccagtgtacaaaagtgtctgctgaaagtcaatgttaagcaaatgatcctgagccttgctacttttgtgtgattagcagcagcatttcttggaagttcttgagaaaagtgggaactgttacactctctctagcaactgctctgtattattttttcacctactttaaaaaaaaaagaaggcttctttactacttctcatttttgtttcctgtttgcacagcttctgttgagagatgcccagtgtggaattggggaggggggtagtgatttcccagaaggctgtttggtcggtcatcatgggtgtgattgggtatcataccatgtggaggaacccgtgctcatggtttccagtgtccatcacctcccggtgcatcaggcaccttgaagtttgcctgatttttcattttgaggtcttaggatgcattttttttaattcacatctcagagggaaggcctcctcttccaagcccagtatatttgacctttagtcctagagaggtaatatcacagaatcacactgtaatgtccgtgggttgcagtaagtcattaacatggacaagtacctatcacaaccctccttacaaatgcatgccatttgttttgtaatttataaactttatataagaaataatataaaaacaccacttgccaaaattattcagaacagaaatttgtggatcttatgaacttttctacttatatgttatgtcttttccccctccctttcctccctccaaaccccttccaagcctaccccaccccttctaaagtttgtggcctcttttactttaactgttattgttacatatatattcatagattaaatgcgtagatacacaaatactacctgctgtgggctaaccatctgatactgggtaactgctcaggggctcttccccggggaaaacgatttgcccctatctcagcatcctttccaagttaacacatgtactgttggtgtctttggcatgccatttttaaaatccattcatggggtatgtgggtttgttccataacgtggctgttatgagtaattcaataaattagagatgaaactccataaacatacatgatcatattttttcaatatttagttaaaaaaattgatccttacttagaaaatcttggcatctgataccattgttacaaatcaagcatttctccattgttctgttctcttcggggcatggtgcagtttacagctgagtaccatgcccacaaaggtctgagtactgaagtctccatcagcagcgtctggcatgggaagtgatgtgacctttatgaggtcgagtctaatggaaagaagttaagtcatttgagtggtgcccctgaagggagaatatcatgagcccagcctcttctccctcactgtttccttcctaagcacagtgatgggaagagttgaacaatcttctccacagtgggctcctgtcttggtgccctgtgctgccacaggcccaaatcaaccatgtcaaacaaccatagactgaaagtatgagtcaagaaaacctttttctttcactaagttgatattcttgggtattttgccgtagagaaggaaagctgacttatggaaacagaaaaacaaaacaaaacaaaactttgattaactcaatagtttttttcttaaaggaaagtatcctcaaaatataagggtaatttcatagtaatgttaattttacaatttttgagtcatatattattaagctacatttcaacaaaagttatagttttgcaagcaatattttgaagttaagaataatttaaaaagctatacttccaaaacctaaaagggataatttgttatttacttaggagaaatgcctaatatttaattttttagagttagttaaggtaaaaagtaagcttaaattatgagtttgttttagagatatcttagaatttattcttagaagtcacagtataagagacgtttttgtgaatctttggagacggcagtttctaaagaacaacttataatcttcctgtgagtatccagcttgcttaaattgaaagcaaatagaggccccttctggctttatgcaagaatgatgacagcaaacagggccctgtggactatagcatcctagagcatgagattgcagtttaacaacgccctgaagcgtaatgagtgatacctgtgtcagtcctttttgagctcagaaaagcccaggaagaaatcatttgaaggcagataatgtccttgattttgacaggcgtcaaaggatcacctcaggtacttccaaaaggcacctaaacatgcagttgttttgatcttttttttttttttcaaatcagtgggacttcctctctccctctctcagtatatttaaagctttgattatctcacatctgcaaatgatataaaaatcatttcctattgtcttatgagagcagaaatgacatctattttatgacataaaaaacaaagcacggaaagcacttgaaaataaccttgctttaatctttcttaattctaatacatgtaggtttgttgtagtttccatcctattgctgtgataaaatgccctgacataaagctacttagagaacaaaaagtttatttggttgtactttgggttacaatccattatttcagggaactcaaggcaggaatttagtgttacggcaacagtcaagagtgaagagagaatcagtatataaatccaataaatggattcttccttgttcacttgctctcatccagcttctcctctcatacataattcaggaccacccagcccccaacctagggaatgctgtcacccacagtgggcccagacatcctgcatcagttatcagtgaagatcggtcctcattaagactctcttcccaggtaattctaggttgtatgaaggtcatagaaaaaactaaccagtgtaagccttagctatgcaaacacccaaataaagaagccttaaataataaggaaatctattacatcgcataaaagctttgttgaattgataattctgcagctctacagcaaggttgcggtccctgggttcttttcatgtttaagctgtgtctaacctctagctgtcccagatgatcaaatgccaccagtagtattctcattgagaaaaacattaagggctgattgaccacttgattgtatgtccctggccagagctgtataaggtcattcttaaaccaattgttgggaagggaaacttcaattttccagtcctaggctaggggcaaggtgaacttctttgaaattcaggactgattataacatctaaactgggaccctcttctcaatgaagatggtagacggagtaaggggatgaagaggttatttagaatagatttggtcctgccatgcagctctttatgacatctttttatcttttctccacctcaaattgtctgcaaaagtcaggagatacccaagcctgcatgaatatgtgcttatacagtggacacatacaagctcccacaaacaagtaattgtatctgatttgaatgcttattagcagcctgagactttcttaaataataaatatgagaaaatttctctcattttttatactttcattatttgaaaaaattagcagttttgatagctataactagaatatataatttcactgtgttactattgtacattagcctcattagcttataaaaatgtcacccaaacttcttagaaggggcaatatgtattcttgtttgttacaggataagggatgtgatcaaactaccagttcccctctcttggctaacatccaagatggtggccattaacactgtacacttagaggcaagctcaaaatttgaagggactgatgatgagttatgttttgggtgtgtttagtttgaggttcttgggaagcaacaagaaagaggtttccagtagagagctagatgtatgcatgagatggttccaggagatggggacttaggagtggtcagcacaggagagatgagataaacaactgaacttcttcacagcatcacaatctatctcttgctttcaattcttaccctatttacaatgctattaatatttgaataccttaattttagattggacaagcaaacattaaaaaataaacattttatgctcatcccctgttcccaagcatgcaataaatttattctataacttaaaagatgcaatattgggaattttccccttgccctggtcttcagcatttcagatctctcaattccagtaagaagtgtttggcctcaagactattataaaaaatgtttggcttactctcttcctattattaacattcaccataaagaatttacagtgtctgtgtctatggaacaggcagagacttagccctaaggaagacagagtaagcatgagaaagctaggagggagaagaggaggtgttgagagggtttcaggcttcgggcagcagccacggctatggcctgtcatttgctggtgtagtgggatgagactccactcggcagctttgctctctgctcagggctgtgctctgagatttctcacagtacctgtgaaggagaggatttaggtggtgtgggcatgatggttagctttagtatctctcaaagagagaatgggtccttcctctgttctcttttaattctgccaatgcagcaactgtgtggggaggatcttaattccgtgttatggtgtctttcactcattaatctcatattgtagtcagagagagggaaagaaagatccagaagtaatagtttcccatgtataatgcagataccaactttgttttcatttttatgtgaatggacagtctgccccctgtattttggagtactgtgccatgatcaaaagtactgagaaaaaaagtgagtgtatgaacatgcacagactttcccctcattgtcaccattccctagagtagtggttctcaaccttcctgttgctgggaccctttaacacagtttctcatgttgtggtgactataaagttgtttttgttgctacttcattgcttcaattttgctactgttatgaattgtaatgtaaatatctgatttgcagccctcaaggaggtttcgacccacaggctgagtaccatggccctagatagtacaatataacaacgtagtagtcacatttattaactataggtaacctagagatacgaaatatagagatttgcagttagatgcaaataggacattttatataaaggatttgtcatccatggaccttgatgctagagaatctaagaagtaatcaatggttaatacccaggaatggttgtatttaggttttaaaggagtgatatgacttaatgttaaatactactgtaggcatatggattctaataccaaagatttatagatggcaatgcagatagacatagataataaaatagaaatagcaaaggcttgaatatacttttaacatagtccttttattagttcatttaacctctcaattctttgtacctttaaatctatttaaagtccttcatagcaattatcattctttctgttaatttatgtttctctgtggaacgcatttgctatatgttaaagcctaagaaagaaaagatgcctaaactttcccgagtcattttctctcagatgttaatgagtaactcttatgcaaaaatagattagcaagaactagagctaaaaatcataggagagcttttaatgttctagaactaatactaaacattaaagaacatgggtacagtgactcatgcctgtaaccttagcacttgagaagctgaggcaggaggattatcatgagttagaggtatccttgactgcaatgtgaaaccgtgtctcaaaacacagcgacaaaacaaaaacatcagcacaaaaaatgttaaatattggtgatgacacagagaaatgaagcttttcttcagggggggatgatttataaccattgtcttctatttgaccttacatcaagagttaatactgctaatagtcctgactctgaaattttcttcttttcatgagtttcttttagggaaattactattaccacataaagtttttatttgagactgttcatcataaatgcccctcttgaacttatttacttaataatcacacattagtgcccgatctgtgcagggcagaggtcttgaactcagaggtgtttcattgatgacaaccaagtcagtggctgtgttgagcctcagttctggcaagggagcaggcagcaagccatccatatgtggatctaattttaaaagttataattgtgacgaagtaaagaacagcaaagaacagctgtggagaggggaaactacgtgagagccatcagggaaatcctctcaagattgtgttatcagagtagctgcggtctgaatggaaaggggtaagaattcaattccctcaaacagggacttttgaatgaatgctagtacatctaggcaagggaatacaactgaacaattgcagcggtaatagcatacaattttgcaagtgaatttcaatggtttcttttttaaagaaaaagtccaatatactttgtgtatttttacagcttgtctgaatgtaagacaacattcaacattgctgaaataaaaggaagggtatttccctaaatgctaacaacatttatttataaatggtcaaattaatagtatgtatatatatgtatatgtgtgtgcatattctaaaagcatctgtaaccaaactattcttttaaactatactcattctttgccacccacagaatagtcccacaagggcaatgaccctctcctgaattatccaaatccttccaagactatggtatgtggtactttataaataattactgagtgtataaatatgtacagatgcaaaagaatgtatttattaaatacttctcatatgccaagtgtcaggtacttataatatatgttatcccaattaacttctgtagcagcagtttgacaggatgaagctttttcatgaccagaaaacaggcttatagaaattagagagtatatttaagtagataaggagaggatccaggacttaagcccaagcctgtttgcattggatggttggtctcaattctatcagccccagcatcattcctacttagctccaaccactggcaaatctgtgagccatgcacacgcgcgcgcttgtgcgcgcgtgtgcgcacacacacacacacacacacacacacacacacacacacacacacggagtgtccaatgaagaaagaaaaacttttaaaaagagaaacatgtttgggtgtattttgcatctgagagtaattttctcttagcaagaatatgtcagtttcctattctttgacaacattctgggaataatcaacttcaaaacaagaacaagagatttggagctgggaccgtaggtcagaaagagaacacttacctatcatgcctgagttaaaaacaaacaaaccaaatctcaacaatcaggagaaaacaagaacactggaacctagaaggcctgggtatcggtctcagctaagtagcatgtcatctccacagtttgggctgcatgtctcagaggtctgggggcaatgatttgtgaagctcaaacttcatttctcatgcaggagtccacctacaggcatctcacgagcttatgtggagtctccacgggctctgaaacccagctgtcaccatctcctgtaatatgtgtgtcatttttctccaacacaattccaattccttagctgcaggatgcaaggaaggcaaaaagagaacctcctccctgttagctagagattgtatcactgcaaaccccattcaccccattgttgagagctcagacacattcgtacctcactgcaggggagactgggtagctggaaagagagggatggatggatagatagatacatgcatacatacatacatatatacatacatacatacatacatacatacatacatacatacatacatacatacatacatatgtgtgcagttctctgagagtgcagggccccaagcccagttggacatacattctgcaatctcctaaataccaccagcattttgtaattcttcagttaccgctaaaaacaccggttttgtgttcatgaatgtgtgtgcatgggtgtgtgcaggttgtgtataaaagacaaaaaaattaaaaatgacaatatcaataattttaagttgccattctacttcatcatcttgagaaagcaatccttcaaaagtcagatgaagtgcaagaacctgaatccaccaagaaaggcttttgtaaaatctgccagcaggcacacaatcaagaaatgtttgataaggctgcagtggaagccgttaaatccttgccttatatgacattaatgaacagaaaccttcattttgaaagcattattgaaaggggtgtcagcctgtgcccactgaagtcaaaactggcattttcaagaataattatacggaataatatttccctcacagctgccttctgtcgtgggagagcagaaaattcaagcaagacaggtcttctcctcctcctggctttatctgccttccacagtttaaaagacaattaagcttattttagttggctgacttttttccccattgcaaaaaaatttccggaaggcatgtaattcagtgttctgagatactgttgtggtctgagaagcgtccctggttgtatagcagacagactaaagaaaggaacactttccctgccaatgatggtcgcaaaaacaaaaggcaacatttcaatgtaagtactcgcaataatttctttacttacattttaccagtttgatgctcagagttaatggggggtgttatggttccataatttaacagaatattagggccctatgctaatacttttctttcttttttctttttgtataacatggtgagttctggttataaaggcaaattgagtacttggatacttctaacatataaatgaataatgtgaatatgggctctttaaggcagtgttctctgagccactgggagtctgagtccaaatgaggctgccctggtctgctaggccatggttattagaaatgcaaatcacactaatcaaatttaccctctgaaccttttcctttctcattcacggccccatttttcccccacatgtctctctcacctactttctcattcatagattttctttgaacacacacacgtctgcaacaagattatcttaaaggcattccaaaatagaaataacagctgagcaatagtaaatggattatttcacttctaattttagaagggttgctacatctttgcttatgtttctccctgggattctgctagtgtgttgtatctgcttggctgttttcacttaggtatttgtttgaaatccaattcttctaggactttcccccttttctcttcttgaaaaggggaagataaataaagggatccgcgctggaggaatcagagttagtaaagctcaggatcctccccggcgtggagtgccaagtgctggtggatgacctgctaggtgcacagtcaggaggtaaagagatgagactggggagaggtgtggcaatttagtagttgagaagttggtcccttggaaggagagatctggataatttgttaaatccagctttcagtctaggcagatgtgtctaacttggctaaatgatgtgtctgtatgtgtaagcatctcttaaagcagatggagaagtaacaatttttacagtgtccagggaatctagttgttacaatgacaggacaggctcttgctttgactgggagtcttggggactaactgcggcatgattagatagagaaaaatggacacagaaccaaatgggagtattggttaatatatatacatatttggcaacatgacaaggactggccactgagggggcagctgcagggactacttcgtcttcagactgaattctcactttcgacttcatagagctgttaaataggtcgcagcacggaaggaacccacaggagcaaaaacaaaagaataaactaaggcaagtgaagggaatgtgtacttattctccataaaagctaaaaggagagatttgttaccatgtgagctgatgccccttgacttggggtgagactgcagccctatatactcctaagttgaaaatcacacaagtgaaaatgcacattggtgcgtctaaccttctaagctctctagctttgaaatggcatgtgtagacagagttttctttagtgatggcctcggtgacttgggagctgtggtttgctggccctgcccacctttatgatagagaattgtaccacctattgctagcctgggggaaaagaaaacccaaaatttggaatttgaagtgagtttttgatgagtggacattatcagtgtacattgtagagtcaccaactgagccatcataaggtgggaatcatccatattctaatatagggaggactgcaggaagaagaatggagactgagtcacagacattaccctagaactttctttgaaataatcagtgaagaggtgggttttttattttgttttgtttttctgttgttgcagctctgtgggtgagagaatcagagctgagtttggggctgtttatgccattttagaccatgacataaatcttgcaggcttacggtgatatacaacaaagagctccatatgccaggtaggtctcttatgtaaatcctactgcaggggcagcctggctggcttcagaaccacagggtgggtagcaagtgatccctgagctggggacagcagaggtgatgggaaacctgtgtcctccgaatctggaataggccgtctgtgtagacagttagagacaggggatagctctctgctgtagatcttccctacatgcaccagcaattccagtgcatctgtggggcactctattgggactgtcatacacccaagtgtgctgagtgtacatagagggcttctgggattgaggggtagaaataatatctgtgtcacctgtaggaagggtaagtatcacctagctcaagttagaaacaagaagaaggatgcttagcatcacaaaaaaacatgagtgcatcaagacaaatagggttattagaggtgatgaaagagaaaggattttttctaaagatgcttgggttctttcctaagggccacatttaaatgaaaaagctcgttgcttttttacatcctggcccagctcagctgtgacaagagactgcagctaagaagggagctggagcgggcatggattagaatacattgaattgtgagttcctctccactggagctctacagttgcggggctggctctacgagaacttgtcctgcctagtgccatagactgtcgcaacctcttgccacttgggtatggataatctgtagctgaccaattctagaagtgccccctgcgcaggggcgatgggtgggggagtgctattggggagaatgaagtgttctgattcccatgaggcccagcctgatcaccgatgggccatctttctcaagaagcttctctcattggttatcctggagagacctgggctagcctttggcttttttaggtaaaaggggaaccctaacagcagttgcttggcttcagccagcccaccctccatgccagcatttcccatttgttctggatctgctcatcccaggattagaaaatcccctctcacccttagattgacaatgccttgaggcactgtctctgtgcccacagcagctctcttgctccgattaacccttgttgctgacagctgaactgaggtttgctgtgactgacattagataggaacttcaaataggggtacgctaacccctgtcaccctggtggagttttccaagtttaattttctttccttcaagaccacgacttttctctcattctaagaacaaagttgtgtgcacaggcaagagctggtacatcatggcagtagtgggaaatggccaagcaagacattctgaatataatttggaaaactgaggaatcccatgggagtgcatcagtcatctttctgttgctataacaaatatctgagacaatcaacttaaaaagaagaaagatctctataggcataaagctgcagaggtttcggtctgtgctctgttggctgtgtggcactagatccatggcagcacaacgcatcatggttagagcacgtggttgaggaagactgcttgccacatggtagctgagacaacaaaggagattaacaggtaatggccacactcccaatatcactcccaatatcaaggtcatatctttggtgacctaacttcttcctactatccccacttcctaaagtttccaccacccgctccacagtctggggccaagcctttgacctagtcctttagggaacattcaaaataaacactgtagcagatagtgaatgctggattatttctgacttcttttcctaatgcaccttagttaggaaaatccaagtggtaggtacagacaactggtctaccgttgccctggttttggacttcccaatacccagaactagaagagaataatgtttgtcattaaatcaccaagtctatggcagttacagaagtctgacctaagacaagcaggttgctttgtgaactcatgggctgtctggagtgcaatactctgtaatcgtacaccaggtaatactgcaataataaaatgctctgctcactctatggcacagtagcacataggctttggcactggtgactaagaagaagagacaaaacattagagagttgggtgagtccataagtctaagctgtacaaagggatggttgatgctcttagtaaagaatatttgatataatgaaaagcagtgaactaaaaaagatagtaagaaaaagacacgttgagcctgttgtttacacagataaaaatgatgctgactagcaacaagatgatttgtggatttgagacctatgacaaatacctggagttgcagctcaggatccttaatattctgtaaatgcaaagctgtaaggagagtgagaaggcataaatgagcagttttaagaatatgcacaaaaacaaacttcatgacttcatgaaaagtcctctgtatgtcaagggattgatgctgcaaacagtggcccaaagctgcttttcaaagcaaggaacagaggacagtgatcaagaacatagaaaatcccagaggcagttttaggagaaagaatgaggaagcactcgatgagtgagtgagagcagagacagccatgaatagatgaaacagtggggtaccagaaatcactgccacaagacaaaactaatctcaggatgatttaaatttctgaagataagacgcaggatcactcctttttacttctctactattttactaattgggtttcaaaaataattgttttattttgattactgtgtattaattacacatattaattgtgtctcagtatgatatttcctcagagtgcactcatgaactgatcagattcaacccacctttatctattttccctatcacacatcctgcccagcttctcatgctcactagtctacatttgacttcatttttaagaatgaaattgggttttatgtctaccagagcatgtttatcccttaaaggtgtgatgacttgtggagttttcttaagctcattaatgattcagtgtgttccatgaatctctatggatcatctgtcagtcaatcaaccagtctgtccatctgcctatttttctacccttctgtgagtgatatggaagacagggaagggactcactttaatcttctctttgataattgtaattgaaataccagagtgggaatgatttaaactagaaatggtgactacgtgtggtggtgcacatctgaaatcctagcactttggaagctgaggaagaaggaagagttcaagaccaacctcagctctgcacagtgagacccaatctcagagaagcaatgagagggctggaatgcctaagagtgcttgctgcactgcatgaggaccggagttcagatcccagaacccacatgaacaaccaagtgcccagcacaggctctaacctcagttctgaagaggcagaaacaaggacgatcaatttctagtgcccgctcacatgtgtgcacttacacttatacacagagacacagacacatggagattaataaatgtttttgaaaaccaagaacaacaaaatgacctaaaagcatcaatccatgtgggtttggaaggacgaagaaagtgctgtgtataaacagaataagtaagaaatggaaatgagatgatgaaaaagatggggccactgccaagaagcttcgagcatacaagcttaccagtgggagttagaagtataatttagaccagctgaacctgaacaatcttttagtcaaggtcaaggccataaataaagggaagagactaccattccccaagggtccatgttgtagtggaaaaaaaaaaataaaacaaaacagcgcctggcagcctgaagctcttggcaagccttgttgctctaaatgtctgcaaagggccagctgcttctccaggaatcttgctggaaatgcagaacctcagctgtctcccccaacagaactggatcaggaaggggagtagccaaccatgttctgattaaatctgagtcctatttcacaagatgaaatccatacctttcaccatagttggggcaagaacctacggctagataagtcatatatctgtaggttaagggatctttcaatctttgtctgagaagtatttgtttgcagtagacagtgattaacacagagacccacaaactggccatggtacagagaataagataccagagaatgctcagtcctaaatggagcctataaacggtaccctgtccttctcccaatgcccagggatcattgctgaagagggggcagaaagagtgtaagagccagggtggatgacagaaaaagaacagattgggggctgcatttccggagattgcagggctgtttgagggaagaattgggaagaattctttttaggatctccagtggtttttctaggcagaattttcaggcactgaagaaatcctcaagattaaagaagatatatacaatgataaaattctatgattcagattcaggctcaagacagggtgggtgagagtgcacccatcaccgtgttctgcagaaactatttcagaaatgaagctatgcactcagtgagctgttcgatgcagtaaagaggaacccggaccatcagggaagaacacttgtgcctcagcaacactgaagtgtgtcgaaggttagcagtcctgtgcccaatttacagacaaaatattatgttaaaaagaaaaaaggcaggtggtggtgcatgcctttaatccagcacttgggaggcagaggcaggtggatctctgggttctaggccagcctggcctacagagtgagttccatgatagccagggctacatagagaaaccctgtctctaaagaaaaataaaataaaaagtaacaacaaataaaacaaaagaaaatccatacgtacacacaaacataattcacacaatgaaaattgtacttagcttgtttcagacctgcagcaaaactagtgatctttaaagaaccactaaccagcctgctgcttgttaattcttggtttattacaactgaaggtgttaaaaacttccaggtcagaggtaatcatcagtcacaggcctgactgagcccttctgaagccacacctcgccgggattgccaccctccgtcctcagtggcagccattagagtataccaacctggcacaaagctccacaaaggatgggaataaagatgcaggaagacactgataccatgacgaccaaagtttgggtaccagtacccatgcaatatgccaagcattcccactacacctataaccctctgagggtggaggagaaggaattgccagggtttactgaattctagcatagctgagaatatgtgagtaccaggttcaggaatgagagcctatctcagaggaataggtggagagtgatggcggttcagtcccaaagaaacacagaggtgtgtacaaccactcatgcatatgactgaacaaataaataatacatcttttttaaatgagaaaaatctacagaaagctcccaaacagccctgctcccttcccctacacagcctctactcgtaacacttaatgttagtgttatcacagatgagccagtgtttaacagtgttaactgattttcagagtttaaggttcattccttggatactaccttctatgggctttgacaagtgtataatgctgtgtgccaattattacaatatcacacacaatagttctactgcctgaaacatcccttatgttttcactggtccttccttcctttctttgagttcatggcctctcttgattgatcattgtactaactcttacctttcccttttccagagtcccatgtggttgtaatcacttagcatgtaggcttggtgcagcagcttctttcccttgtcttcatgcacctaaaggcctctgggtgttttttgtgacgtgatcatccatttctgttcatcactgaataatggaccatgatgtttcagtttgtcatccattcacatatccaagaacaaattggtttatccataattagaccagttttccatgtgattactgcaaatagtgtgcaggattttttgtttcttggcttatttgtgggtttgcttttttaactcactggggtgaaaaccaagggatgaagttgtgagactggatagtgagagaatgtctaggcctgtgagaagttgctgcactgttttccagagtggtcataactctccatttccacccacgaagaatgaagagcacccgaagcttcagaatctgctgaatttggggtgcttgtggttctgggtcttagttgtctgactcattgttggacatccatgaagtcatctgcattttcttcccatggagaggagtcctggtctggtctctgtctgtctcatggttgatctcctctgcagttccctgatgacaagtaatgtctaatatctttcatacgttgattggccatttgtgtatcttctttgatgaagtccagatcatatgtccatttttgtttgtttgtttctttgttttgttgaggtggggtctcactgtgtagcctaggctgttctggaacccaaccaacagcagtcctcttgtgcatgctcctccatgctgggattcttttatctgaatttgatccagggtgttggctttcttatggttgggttttcagaacgacttgtgtattgtggctactagtttttcattagttgtgtgttttttcagggtttttttttctggtctctggattgactttcatactcatgacagtgtttttcacagaacagaatgacatattactcatcaatcacttcacttatggatcctcctttttatgttatatctaaacactcatgatcagatgggtgtgttgacccacacgtataatccaagcactggggaaaccaaggcaggagagtcacaaattttaggacagaataagttacatatcaagattttgcctcataaaacaaaatataactggagccagggaaatgatttggcagataaaggtgcctgtcaccaagcctaatgacccaacttcaaacccccaggggtccacatgttggaaagaaagaaccaactcctataacttgttttttgacttctacatgcatgctatggtgtgtgtgtgtgtgtgtgtgtgtgtgtgtgtgtgtgtgtgtgtgtgtgtgtgtgtgtgtgtgtgttaggtcctccagcaggtagggctgtggaagggccagtctagctggtctcttcctgaggctgagtggaatggagagtgtctacgacccagctcccctcttagtcactggagagaaccacactgagttgggagacttgtcaaagcgggatctctctttattgcatcaggcagacttatatagggttgaggaagtgggtggggacctcaggatggggtgaggtgtaagggccaataatatttcaccatgtttgaagtagctgagcagaggaagttttactgagtcactcctatgtggaagtgatagccaaagacaggtggccaaactctagccaggttcaggaagttctactaggccttgcatctgggcctttttaggtccaacatatgtgcatgtgtgtaggcatacatatactgaattataaaacaaaaattcagggccaaacccaggtcacctgtagacactctaagtgttttataattttatgtttcatgtaaaatttatacttctgattcactgagaatttttttgtgaaaggtgaaagatacaaactaaattcccccccttttctgtttgtttttttttaagcacatggaattcattcctctttgttgctattaagtagccaaagatcatatattcttgtattaatgtaccacatttttcttgctattcatccattgatagaaattcccattgtctgttgtgagtaaatgctagttggccttattccaacattgtacagttttggttactatggatattcagttagagatctatagggacatagtttttatttatcatatataaaaaaaacctaggatatgctaagtataactttattttattaaaatcaattttagaaaactctaaactatttctcatggttatacaaattcaaatgccccactatcaatgtaaataaattcaattttctcaacatccttactaacacttactgtattgctccttcattgatatctgttcttgaagttcgtttggattaaatttacatttgcctagtgactaatggtgttgaatatctctttctgtgacaacctttaaaaagaatccactcaggtattttgcattattttggtaggttatcttattctagggagggagatctctctggggttacatagaaatcttttttttttttcagctacgtagtgcaaatattttctctagctctctggtttttccatatttgctttcataatggtgtcttttgtacagtatatgttttccactttgatgacagccaatttattgaaccgtttttatgattagcagtgtttgtgccctcattgaggtgtttttggcagttagggtttggtggtatgtgcctgctaccacagtactcagaagggtaagacaggaagatcatgagtttgagagcagccttgactaattgcaagaacttgaacttgtctcaaaaattttttttgaaaagatttttttgctactcccatgtttcaaattttatcattagtgtcttcctcttggagttttagaatttgggcatttagacttgtctgctatctactttttattgattattttatgtaatgtgagacagagacccaggtttgttttttaaaatctagattgaagtcggttggttccagcaatgctgtttggaaagcactacccacatcccactcatttcctttagcaccgttacaaaaaccaattggccaaatttacattaatctgcctcttaactcactattttttccattaatctgcctgctacccccatgccaacatggcactttcttgattacttcctctttccagtcagccttgaaatcagattatgtaagtgctccgtgctccatgctcttcatctcaaagcttgtttggctagtctagaccattttcattttatatattctgctggaagtttgattctggttgtgagtaatttgtcaacctgtatcaaggaactgaactggtattaaaaaaatctatcccttaatctttgaacacagaatgtttctccatttatttagaatttctttaattactttcatctgcatgtgaacaggtattataaaaacttaccctaaaccatgcatgcttcagtggtttagcaaattgtgatattaatcacatttacatacttgtgaattccctgcttggctataggacaatgacttgtttcattctagtttatttttgatcaatattatatcacctttctaaatgttagtcattctagtggctttttgtgggttccttataactttcccccatagactcccatgtagtgagggagtgacagtctaacttcttagtgtgcctattgctgtgttgtctaaagtcccatgtctgaaaataaattccatatattttgttcagtttcctaatgtccacactgggaggtctaatctggtgaatagctagaagatagactcttatgagattaactttagcagaatctatcttattctacatattcttcctttcctgcttttaattggatgttatcatttttttcatattgttaaaaactccttcattaaagcctccctctacaagctgtctagtatgccatcatatgaacataatgtaatttattcagttatccctttagtgtcagactattagaggatttttattcgtttaaatagtgttatcacagatcttttaaagtcatttcccccagcaaacaaatggatcttggtattctgtaagaagtaacttacctggaaatatacctttaatttatgtaagttagatgatttcacgaaacatctacggcctcacatatatgataggtcagtagcttagatgccagtattactgtgttccagacactgagacacaggaaaattgaaagttgggctaactcgatgcttactgacaatgacaggatcagggctcaatcaccccactcatgttcctatttctattgtctcagcctgtgctctctgaaccagccatccagaaatcttggtgtgctctggtgttgaatgttcttctccaacatcagactaactctgtaagctgttccatggttgaattcatgccaccctttctttcttccaggacagtttttatgtaccccttggacccacctttggtaaagccctaaccgttacttgttccaaacctgatggccaggcactggctcatccatcagccaaactttcaaggtccttaaccaccagttaatgctctgcttccacagtgggttagttcagtactctagcaggtgagtggagcatggcactctttcccttagtcaccaggaagttatacctcttttgtatttcttgctttaagtggcccaataccatgttgctaggccaagacatcatacaaagtatgaaaaggcagcttcatcaacattacacactccctgctgtctttgtgacagagtgtgatcagcattatgttcaaccccttcttaacaattaccatgaaatagcttctcttctgtcttgttaggtttcttgctgtgataaaacaccatgaccaagagcaacttgtgggggaaagagtttatctccagcttacaactgttaggtctcactccatcttcaagagatgccagagcaggaagcaaaggaggggggggatgaactgaagcagaaactgaggaagagtcctgattaccgactcactctctctccatggcttgctcagcctacttttatataagaaggctttcttataagacctcctgcctaggggtggcaccacccacaatgggctggccctccataccagtcactaattaagaaaatgcccctacagccccacatataggccaatcttctggaggcattttctcagttgtggttccctcttctcagataacccaagcttgtatcaagttgacaagtgaatcaaccaggacatcctcctccactttggccctgagaataatgtctttctaagcattcctttcccttttcttggttatttcttctgctcctttactcacacccaggcttccgtagtccttcttctctatagtgtacaactgtcattttgtgtcccaggaagtcctacacctttcatgtcaaccaatggaagagaaaaattctgctgtgggggaaagtcagaaaaggtaacaaagaaccagaattacagtttgatctggtcttgatctttgccaccctgtgatccttaaatgaagcctcacctgagatacagtctatttacagaagtgctttgaacccttaagggttgatcttggccctgtgtgcagtggaagaggatgtctttttcaaccatcatagactatcaggaatagatgtcttgacagttacctaatccttgtgattcttctctttgagctgaacttgagttcaaatggaataggattctaatatatttttctacctagtttcagacttgcagacacctgaagacaaacctaatttcatgtagggttcatcttttcccaagcatatccttctcatcaggtacatatgtgcattgtattataacaaatgcatttccacagggtggtcacctacagcaatagaagtttgtcattctcacccattcttcaggcagggagcccaggattaaggtgtgagcagggctgatttcttctgtgagcatagaggctatcttttgtagaactgtcctcttgccagtcacaggatggtatttcttttcataggatagcctctgcctcaccattaacttgattacctctgaatattttacctgtttggtttcttgggctcatccctccctccctccatcactccatccctccctcccttctttccttcctttcaatttctgggctatgaaagtagcttatttgtttgattatttgcctagcatgtaggaagtcctggggtctatttccagcaagaagtaaaatccagatggtactgtgcacctttcatcccaatgctgctgaggtagaggcattcagaaatagcctgggatatatgagaccttgtctggactatatagaaaattcaaggctagcctggatgagactataggatagtagtttccacactgcattttgaaggagagcatggtgcttagagtctctgctctactctgttgtcctctgtgatgctcctgggctctatcttgaacaggccatcgtaggagcagacataggtcatttcagagacagattttgtttgaaaaatcattggaaactttcattttctctcaaggtagaacttgatttttattgttctcttgatcttcctcctcctttacccccttctctctctgtgtccagaaatgtaggacacaagccttgactcaggcagccccaacaggctaggatctggcacccagcacaccaattagagaaatgagcaatagtgaaaagaaggagaaggtttaatcagggcttgttgtggggcagatcccgttaggtgtccatggtatacatatgagcttcagcgtactctatgaagaattgagaggtatgcaaaattaagtcctggtcaaggtgcattcctgaagaccattgtctcatctccggttctgaaaatgggcacgtgagaagctattgattgagggacaaggagaagctccatcatgcttcatggtacaacctcagatagtggctaagtgcccttgcctggctctactgttcctcaaatcaaaggtgaccgtatgtgactagaaattttaagtgttctttggggatctggaacaaaacattgtgaagggcccaaagtctttgtgtcttgaacttcaaaggagaatgtcatagggtcattgtcactagccccttacaggggtttcttgtgtgagtaacatgcctacacacagaagcagcatttcacccaacatagagaagacagatggaaatgaaggcagagacaccaggctttttcctggttttagttagactgtgggcccaagtgaggaattcatgcttcttagcaaaatccatttctgtgtattgctagtatgtgtgtgcatcatgtgtgttcatttgtacaggcacacacatgcctttgtatctgttgcttggtatcaagatctatttccctcttagctgacaaaggaaaatagctggcccctgccccctcagtgtagcaaactttccagttcaaccattgtttcttgatttttgtttggccaggcaccatgggcccaagagacacaagaaatagctctgccctttgagctcacaagttatggataatttgtatcggaatacacatttacaatgtggtgtgctaactgcaggaaagaggagtacactgcagacctggcacagagaaagtaccgacccactgagagcaggtggggaggacttggccatgaagggtttcagatagtacagtgtctggtgggtgctatggcagctgtatctgcttttgaaaatgacagtacacaggggtagagatataagaaagacgagtgatgtgattgcttggaagggaccacattaggcttgttactctgctttcattgagggattttcagaaaggaacatttttatcaggttctgtatttggtaaatagttttgtgatgttgtagaagaacaggacagagagaccagttgaggttctttctgttgcagaattttggataaggggcaataggaactatgctaaagcaatagcagttggtatgagggacaagcacttcatggaagaaaggtacacgggagacttggaaattgacaaaattcaggttaatggcaaggaggaagtgtttttttttttttttttttatctttgacctgaatgggcacaaaactattggcttattattgagcatagatagacaaagcaaggatttgggcatgggagtaacttctgtacctggatatacactgaccttggagacccataggagtccacatagacatggctagtggccttgaaggtagggtgtagtgggcatctctcactgattctctaacccaagttttcttcccctgaaggtccccattcaggagaagtgtctcattggaattcattctgtcatgcctaagtgatgaagctattattgtacagtttaacaggccatttggtgctgaatttatttgtattaggaactcaacagatttatagtaatttacagtaattccatagaattactgtcttgggaaacaatgttctccagtagttgaatcttattttaaaaagaaaactaaaaactacaaataagagcactggttagtttctataattcctttattcaaagttcttactattttaagagatgtttatcaatactttgttccaatactgattcctattaacctggtaaattctttttaacacacaaaccaccgtgtgttttctccctttgatgttgccaggaagggcagaagctcttgccagcatcctgttgcccacagctcacctatgattctttgtatctgttcccaaatccatatgctacaagatcattctatttcatggggaaaaatgtttatggatacctctatttcataaaactcatagcacatcgtaggacacaggtgctctcatatttactaagtctgaaaacccgatggagttctctaatatcattagtgctttaattagcctgtgtcatgtaggtgccccttttgcttctcagcacttactgtgtcctgtgtcatttgtctccacactgtccaaaattgagaaactgcatttgactcaaatacttattgcaaactggcactgagtcagagagagcccagattccagtttctttgtcttcccaattctatttctatctacttgttttaagtttctctgccatttttttggttatttttaacgcagaagagtgataaaaagtctttaaatctcaacttgggaactctgacagcaagaaatgtattgctaattgaaacctcctttggggggctcctgtgaagcatccttgctctactggatgctggcatgctattttagacacacatctcagcttatattcaagcatccctctttatatactcttttgtcttttcttcttcataaaaaatctcaagggatttggagactgagaacataaaagggaagctttttctcttcactttgacattgcttttaaaacattccttaagtcctagatgatcccaaagctgtttaagaagtagtcagacacagtgtattaaaggacacatcaagatgttcattccatggactttgtaaccccaaatcatatgtttggggtgaatgtattggattcataaaattgagactgtcttccaggaaagcaagacaaatcactcttcttcttcttcttcttcttcttcttcttcttcttcttcttcttcttcttcttcttcttcttcttcttcttcttcttcttcttcttcttcttcttcttgttttttcctgaaacagggtttctctgtaactttggagcctgtcctggtactcactctacagctttggagcctgtgctggtacacactgcctggcttattttgttgttttttaaattgtttggctgtgtttatttttagccaaacacagacttccagaagtttgacatattaatggaatatactgtgggccatcatgtcatttactcctgctctcttgtaggcaactgagataagatgggttcctaaggaactgcttagatgcatgatcaatttttttctgaaataattatgtgtattctacaacagaaaaatgtcatgagctgtaacaaagaaaaagggattagtgggttaaagacagggactgagaagttcatgggaggtggagggggcactttcaaggcacttgaagtacggaatggatagggctctctgtctctgtctctctctttctctctctgactcactcactcactcactcactcactaccagccactctgggctatggagcctaaggaaatgaatccttagactaaggactaatgactaatactaagtctaaggaaccccaggctgctccaccccagaatccttaaataagtttagtcctctgtagtggttccgctggccatttcctcaaaggaccattctgttgatgacagagctgggtgacatggtcttggagaggagagatactggaggatcctactatgcccaaagagaagttgaactggtgtcagcactctgagatgtgagcaagctggttctggagcacagctgaggtagctggagacagaaagagaagaaaaagatgggaatgcaggacaggccacatccttgctgagtaaatgaagacacacatggatttttatgtggaaaaccaaagttgttttctaatcttttttatacacaccttaacaaacaaacaaaacaaccaatcacaccagctacttggcaagtcaagacctttgtctccttaattgccagcaacagtattcctcacattaattataatagtaactaacaataatgaatattagtagtagtgctaataattgtagactaattatgtagtttatgagttttcaaagggctctggaggtatatgtaggtgaaaaacttgcccaaagccacccagataagtaaatgaggctttcaattcaaactcaggacagtgtgaccctgaggttccctctgaatgctcttgatggctatctggcttgcttttcccatgttagatcaatacactgccacaaaagaaagtgatctgacatggaccacccatgaaccttcaatatgctttgtcatcaatttgtgggtgatactatttggggcaaagtgactgacctcatgagttcatgaggtgaaaaggacaatgctgctcgaatccagagaccataagtgccattaaaattaaggaggcattgtgttgctattttatgtcaatttgtcaaaagaaaaattacatttgtagctggagtcagtaaaggcaagaacaggtagacactgctgttcttcaggtcaatttgataccacccaccaaaggtctgaacacttgtgtaagcaatctcatttcttgaagtgtactttctggaactattgatatacatagttttttatgtcatcttattatagctttgtttaaaataataaataaagctggggaaatgactcagcagttgaaggcatgtgctaccccttgcagaggaccctagcatccatgttgggtggctcacacactgactgtaactccagctccagagcgtctgaagccttcttctggcctctgtgggttcctgcgctcatttacacacacacacacacacacacacacacacacacacacacacacacacacacacatctttttaaaaaatccaaatatcagtttttagtaatattattaagcaatttatattcagatatacccaaacttttggcattgtcatctacaagatttatgcttaagaactttaaaatcaagttgcctaaatcaaatagtaaaattatgatgatggtggtgatgatgatgataaatctcataatattttaagtaagcgtatgtgtttgcattggaccacattcatagcagtcctcagctgtagctgtgtctaaattagtttagcctagtgcttgagaccatggaactgactcctgaattcacatcccctgtcacccctcactagctctgtgttctttgaagatgttattgacagtaccaatgttcctatctgtacaagggatataagcagcacttccttatagggttcttgtgaatgggattgagctgagtgcacaaagcctgtggacagacaccaggtagcataacagaagttcttcaggctcccttacctggaattttaccctcagcagcttctgagcaaactacagcaacaaagtattaactggaaaattccagaaataagcaactcataagtttaaaacaactttcattctagtgtgtcagtataatttttgtgttatgttactagttgttgttagcctctctgtgtgtctaatttataaatagcattgccatgactgtaaataaggaggggctctggcattattttctggtaatccttcatcagcgatttttctgccactacagtaaaagcttgatgcaaactcctttgaaagcatagaaaactaggctttgctctcagttttgggggctcaaagcccaagattaggcaaccccatgagtttattctcagagagtggggtatgttattacccgcagctggagcacagtgaggacaagggggggtcccacatcttctgtgggcacaacccctcaacctaaaagcttccataagaccctgtctctgaaagatccatggcacctgcaattgagcaccgtcaatgggaccaaaccttcaaggatgataggttgcaggaatgttaaaacagttaaattgcattccagtaaccttcaggaggcacacatgattctgccatgaaatgctatgggagtagagggctgttttggaacagtgtgcacggtgacactctgtttagtaaaataaaaataaaatcatatttaaaggtctctaaatgtgtgcacaaaagcgtccatagcattgtaagcaggaagatatttatataattaagacaagcagggtggaaaataaaggaaagggggaaacactgtattttattgctcatgtctctatgctacctgagttttgttttccacaaggctgggtcccttttgcagtgaggaaatcaacataatttaccttcctggccagtgtatcaggaacatattacataacctgtcatgggttaatctaatcacagcgttggattatatggcagtggctggcatcgtttaaaaatgaatgtattcaaaatttggttaagttagagtctacaagtacataaagcagtgattcaggaaaatcctaccatttggggacgtgacttgttttgaaactcaaaattctttggctaagttaaaaagaccttgttatgaaaataacagattttcatttcctttctaattttataactcttggcaatgcaacctgtgttttgcagtggaatgctagagaaggagatgagtacagacattgagggagggtttcagttttgtttttttcaaaataaatccatgcttaatgctgcctaggtatcacggtgctgtgaaatatgggggtacagctgagaaggggacgtctgggggtgtggagaggggctttcttgggagttgtgaacttcaacacctgtgttcaagtcacaaatagacggaaatagattgtgaactctgccacaggggaggttttcagcaggcttcctgggactcttgggagcccatattgcggaggacagacagcgacgcccgtgcaagcacgccacctggtgggcgcttatggtaacttcagagtgggctgacttggttgctgcttgactaatggaagaccttacacttgtatccacaactctgcaggttccttacgtaagagatgagtgaggtattggtaaacgattgcatgttgtcaatagaggagactgccacggggagtctaagagggtgacatttttctttttctttttggaagaacaaagaaagtttttgcagttcaaagccagaggagctttttaaaaagtccttttcgtgtctttttggaggaacttaagccatacaaaaagtgcacagaatgctgtaaccatgcctttactgtgcccagagttgacaagtgataacattttaaatacttctttcttgactaaaatatcaaagcctttcaaaaatacttatttttaaaatcttatttttaattaacaaatgataattacacataattatgtaatacagtatgatactctgatgctagtttatactgttaaatgagtaaataaaagaatgactagaataactcaattatcagagtcaggcctggggggtcacacatggaatcccagatactctttcctcagaggctgggacaggagaataatttgagcccaagagtttaagctcaacctagacagcatggcaagactcctcgcctctaaacagataaataagtaagttaattatataatgtccacattttcatttctttatggatagaataataaaacatactctttccccgtgtttgaagtctgtgttagcattacttttcatggccaaactatgcaataggtctcaggcttgcttctgctaactgagcctgcctattctttgccttttctctctctgttacctgtgtccttcccaataccccttttgtctgaaaataggctaagctttacttgtatgagtttgactccagaaaagtccacatataagtaaaaccatgcagaatttgtctctctgtgcctggcctacttcagttagcctattgtcctcagggttcacccatattatcctaagtggcagatttttctacatgagcacatacacacgtgtgtgtgtgtgtgtgtgtgtgtgtgtgtgtgtgtgtgtgtgtgtgtgtgtgtgtgtttgtgtttgtgtttgtgttgctagaacccagaaccttacatgtgataggcacacacactatacactaagctactgcctagctgcttttttttttaaggctaaactgcattccactaaatattgtttcacagtttccttattcataaatgaatctcctttgaacatatccttaatctcatgtgatttctaatttcatttcaactactatcatcagttgggtgaatgaatatctttaaggttcttttttatattttgaagttcaactcaatacatttcatcaaaaatcctgtatatgtcaggtactgttttggtaacctaggatatgttagggaacaaaaaagacagagaaacttctattcataaagctttcactttaactagggtgcatatattaccctgatgaggggatataagcaatctattgccctatcagtggatataagcagtgtattaccctaacaatgggttataaacaaccatctattatcctaatgaggggacataagcagtatataaccctaacaagggggtttaaacagtgttattaccctaacgaggtgatataagcaatctattacattagaagaaaagtacaaagtggggaaaatataaaatgggataggtaaaggagaagcagaattcatggaatacatgggcagtttttagaacaaaatgggttggtcaagatcagcctctttgacaaggggagatttgagctaagacttgaacgagatacaggaattagctgagagattctcaagaagaaaggcgtccagactagatggactgtttctgcatttctgatctgtagagaagtgagggaggatgcttcggaaaacaaatcaaagactagaagtggatgggacggaagcatgcaggaggctcccaggaaactccatcacgctgtcatggtgagccttgggactgtccttaaaaggtgagaagctgaagtggccctgctcggaggcatctgatgccaggggtttactcgctggatctgagctcagcagcgggatccgacagacacacctggacactgctgaggccccggtgggagttctgcctccatccaccagttgaggtgggccaggggctgtttctggttcccgataagtggccatgctcggaggcatctgacgccaggggtttgctcactggatccgagctcagtagtgggatccaacacacccagacactgccaaggccccggtaacagtgccacctccatccacgacaagaggacagacatcagattattggaactgtttgcatctaccagaagggaaccttggtcccatacccaccaggagaggaagagactcctgctacacccaccagaagaaaggatgagaagaggacaatgtaaaagcacatcaacaacagaaaacccaatatgccaccactgcagactaggaaccatacaccagcaagacctgaacatcacaatgcagatgaagcagaagagaatgaccttaaaaacatcttcaggaaaatgatagaggacctcaaagaagacatgagaaaatctctaaaagaaatggaagaaaaaacaaaccgaaaaatacaagatatcaacaaatctctcagagaagcagttcaatacctaaaaactgaaatagaggcaataaagaaagcacaatctgagggaatgctggaaatagaatagctgggtaaatgataaggaaccacagacacaagcataaccaacagaatacaagagatggaagagagaatctcaggagttgaagatacactaggagaaatagactcatcaactaaagaaaatcttaagtccaacaaatccctaacacaaaatatccaggaaatatgggaaatcatgaaaagaccaaacctaagaataatacgtatagaagaaggtgaagaaatccagctaaaaggcacagaaaacatattcaacaaaatcatagaacaaaactttcccaacctaaagaaagacatgtcaatgaaaatacaataagcctacagaacaccaaatagactgaaccataaaaaagatttcctcaccacataataatcaacacaccaaacatacagaataaagagaaaatattaagagcagaaaaggaaaaaggtcaagtaacatataaaggcaaacctatcagaattacacccgacttttccatggaaactctgaaagccagaaggtcctggatagatatctacctacactaagagaccatggatgccagtccagactactatacccagcaacgctttcaatcaatatagatggagaaaacaagatatgccatgacaaaaccagattcaaacaatacatatccaccaatccagccctacagaaagttctggagggaaaatggcaacccaaggaagttaactacaaacagaaaaatataagctatagataaccccactttaccaacagccaaaaggaaaaagggatagaatcccccacacaattttgccaccatcatcaaatcaaaaacaaacaagaatggacaatcaatggtcattaatatccctcaacattaatggtcttaactaccctataaaaagacacagattaacagaatggataagaagacagaatccatcctgctgcatacaagaaacacacctcaacttcaaagacagatggtacctaagaattaaaggttgggaaaagattttccaatcaaatggacccaagaaacaatcgggggtggcaatcctaaaatccaacaaattggactttaaactaaaatcaatcaaaagtgatgaaggaggtcacttcctactcatcacaggcaaaagccatcaggatgaagtctcaattctgaacaattatgtcctaaatacaaaggcatccacatttgtaaaagaaacattactaaaattcaaatcacacataaagccacacacaattatagtggaagacttcaacaccccactctcaccactggacaggaacaccagacagaaacttaacaaagaaacaaaggaactattggacttaacaggtatctatagaacattccatccaaatacaaaactatataccttcttctcagcaccacatggaaacttctctaaaatcgaccacatacttggcaacagcaaacctcaacaggtacaaaaaaaattgaaatagccccctgtatcttatcagaccaccatgctttaaaattagaattcaacaacaacatgaattagagaaaacctacaaactcatggaaattaagtaatacccaattgcacaattcctgggtcgaggaagaaataaaagattttctagaattcagtgagaatgcggacacaacatacccaaacctatgggacactttgaaagcactgctaagaggaaagttcatagcgctaagtgcccacatgaagaaacaggagaataatcacactagagaattaacagcacaactgaaagctttagaacacaaagaagccaatacaccccagaggagcagatgccaggaaataatcaatttgagggctgaaatcaataaaatggaaacaaggagagcaatacaaagaatcaatataatgaagagttggttctttgagaaaatcaacaagatagacaaacctttatccaaactgaccaaacagcagagagtgaacatgaaaattaataaaatcaggaatgaaaagggggacataacaacagacacagaggaaatccagagaatcatcaggtcctactttgaaaacctatattcctcaaaattcaaaaatctaaaggaaatagacaattgtctggacagattccacttactaaaattaaatcaagaacagataagcaacttaaatagacctataacccctaatgaaatagaagcagtcatcagaagtcttccaaccaaaaacagcacagggccagatggcttcagtgcagaattctaccagaaattcaaggaatagctaataccaattctcctcaaagtattccacacaatagaaacagtaggttcattgccaaactcttttttatgagacttcaataaccttgatacccatgtcacacaaagacacaactaagaaagagaactacagaccaatatccctcatgaaggttaatgcaaaaattctcaataaattactggcaaatcgaatctaagaacacaacagaaaaatcatccaccatgatcaagtaggcttcatcccaggcatgcaaggatggttcaacatatgaaaatccatcaatgtaatccaccatataaacagactgaggataaaaaccacatgatcatctcactagatgccgaaaaagcctttgacaaaatccaacatccctttacgataaaggtcttggagatatcagggataacaggaacatacctcaacataataaaagcaatatacagcaagccaacagccaacatcaaattaaatggagagaaactcaatgcaattcctctaaaattggggacaagacaaggctgtccgctctctccatacctcttcaatgttgtccttgaagttctagctagagcaataagacaacaaaaggagatcaagggaatacaaataggaaaagaagtcaaactctcactatttgcagatgatatgatagtttacataagtgaccctaaaaactctaccagggaactcctcagctgataaacaccttcagcaaagtggcaggatacaagattaactcaaaaaaaaatctgtagccctaatatatactgatgacacattggtgtagaaagaaatcagagaaacataaccctttacaattgccacaaacaacataaaataccttggggtaagactaaccaaaaaattgaaagacctgtaccataagaattttgaatctctaaagaaagaaattaaagaagataccagaaaatggaaagatctcccatgctcttggataggtaggatcaacatagtaaaaatggcaatcttgccaaaaggaatctacagattcaatgcaatccccatcaaaatcccaacacaattcttcacatcattgaaagtacaattctcaactttatatggagaaacaaaagacccaggatagccaaaacaaccatgtacaataaaggaacttctggaggcatcaccatccctgacttcaagctctattatagagctatagtcctgacaacagcttggtattggcacaaaaatagacaggtagaacaagggaatagagttgaaaaccctgatattaacccacacacctatgaatgcctgatttttgacaaacaaaccaaatttatacgatggaacatagagaacatctcaacaaatggtgctggaataactggatgtggatatgtagaagactgcagatagacccaagcctatcctcatgcacaaaacttaagtcaaaatggatcaaagacctcaacataaatccagccacactgaatctaccagaagacaaagtgggaaataaccttgaatcaatcggtacaggagaccgcttcctgaacattacaccaggatcaacacacactgttgatcaacaggacactgagatcaacaattgataaatgggacctcctgaaactgagaaggttctgtaaagcaaaggacacagtcagcaagacaaaacggcaacccacagactgggaaaagatattcaccaaccccacatctgacagagtgctgatgtccaatatatacaaagaactcaagaagctagtctccaaaacaccaaacaacccaattaaaaaaaaaaaacggggtacagaactaaatagacaattctcaatagaggaatctaaaatggctgaaagacacaagaaagtgttcaacatccttagccatcagggaaatgcaaatcaaaacaactctgagataccatcttactcctgtcagaatggctaaaatcaaaaacactaattacagtttatgctggagaggattggagaaaggggaacattcctccactgctggtgggaatgccaacttgtacagccactgtggaaatcagtatggcgattcatcaggaaaatgggaattagtctaccacaagatccagcaattccactcctaggcatatacccaaaagaagcacattcccacaacaagggcatctgttcaactatgttcatagcagcactatttgtaatagccagaaactgcaagcagcctagatgcccctcaaccgaagaatggatagagaaaatgtggtacatttacacaatggagtactactcagtggaaaaaacaatggaatcttgacatttgcaggaaaatggatggaactagaagaaaccattctgagccaggtaacccaatcacaaaaagacaaacatgatatgtattcactcatatgtggattttagacataaaggattaccagcctacaatccacactgccagagaagctagtaaacaaggaggaccctaagagagacatacatggtcccctggagaaagggaaagggtcaagatcccctgagcaaattgggagcacagaaggagaggggagggagctaggggaatgagaaggggagaagatgagggatgcagagggcatgagggagcaaaaaggttgagtcaggcgaagaatagaagataacaagaatggagataccataataatgggagacattttaggattacagagaaatcaggcactagggaaatgtctggagatctacaaagatgacaccagttaacaatctaaacaacaaaggagaggctaccttaaatgccttcccctgataatgagattgatgactgatttatatgccacccgatagccctcatccagcagctgatggaagtagaagcagacacccacaactaatcactgaactgaactggaatccagttgcagagaagaatgagtgaagagcagaggggtccagaccaggctggtgaaacccacagaaacagctgacctgaacatcagggaactcttgctccccagactgatagctgggaaaccagcatgggactgatccagaccccaggaacatgggtttcaatgaggaaacctcagaaatctgtgggacctgctgtagtagttcagtacttatccctagcataggcttggactttgagagcccattccacatagaggaatactcccgaagccaagacacaagggggtaggcttaggcgctatcccaaaggatacaatagactctgatgacaccttatggaaggcctcaccatccagggggagcagaaaggatatgtgataggtagggctttagttgtggggggatggtaggggaggacaggagggagagagaactgggattttcatgtaaaacaatcttgtttctaattcaaataaaaaaaatctgaacaacaaaaacaaaaaaggtgagaagccaccccagggttcaagtcatcagaagtctgggccaactggatgctgtgctgacaacccatcctaagaggaatgaaagagcaccaccaggagtatgctatagtcacctaaaaaggaggcgatggtggtctggccttatgtaacaagacgaagaagtgaagtgagcacgttcttcatatgtcctgaaagtaaagccagcattctgatagattcagaacgtcaggtagaggagtctttgctaaattactattattaaggtgagactcatataactttaaaagtgcataattttaaagcatataatcccgtggcacctttacttcgacaaagtcaaatttttcaccttgatttaattggtattagatttgtgctgctgccacacttacctaggatagatcaacttaaaggcataaaaggttcacattgcccattgattcaagagtttcaggctggttcaaggtcttggagagaggagagtagccctccaggaggacagccttcaatgcagcacgagacggaggaacagacactaatgtgttaatgttgctccctgtgtatacagcataaaacactgtggcacttaaaatcagattctttagtgatggactgggaaggtggctcagtgggtgtgggcggggggcttgctgcacaagcatgagaacctgagtttgaatccccagcacgtcaaaaaaaaaaccaaaacaacaaaaaaaacaaacaaacaacaacaacaaaaaaaacctgctataatcctggcgctggcactataaggatggagacaggagactcctgaggctttgctggcctctaggctcttccagaaaccccatatcaaaggaataagatggagaaagattgagcaggatacatgatgtccaacctccttgggcctctgtgtgttcatgggcacgtgtactgttacacacacacacacacacacacgcacacacacgcacacgtgtgtgtgtatacccccctcagtccaagttctcttctgtgactccttagaatctaccacaacataccccaatacagctccagcagagtcccagcaaacagaaggctttctttgcctcttgaatgaatgaatgaatgaatgaccagagatctcattgtcaggctgaggtcaaggagattagatgagagcttacctttcataggatgtgttttgttctcgtgaggcttctgtcattgagacgtgagtgcctgttacatgctggtattgaacaggacacacagagtccctgatttgtttatggagctttaatttaaatggtggcaaactgtgggaacgaggctaggtcttgaataaagacacttatgggatgattttgaattatgttcaaaaacataattgaaaatcttattcaggagctgaacatcttttcagaagtgtgggctctttagacataagcagagcccctttcagcccgatcacatttagaggtgtgtgtgtgtgtgtgtgtgtgtgtgtgtgtgtgtgtgtgtgtgtgtacatgtgtctgtattgtgtgtatgtgtacatgcgttactgtgtgtgttatgtgtgtgatgtatatgaatatttgagtatatgtgtgaatgtgtgatgtatactctctggtgtattatgtgtatgcatacctgtgtggtgtgtatgatgtgtgatatgattgcaatttggggtgaatatatctgtgtgtgtgtgtgtgtgtgtgtgtgtgtgtgtgtgtgtgtgtgtgtgtttgtgtgtgtgtgtgtgtgttccataacacatgtgtggtggtcagagaacagcttgtaggagttggttctcttcctcactaggtggggtccagggtaagaattggtagcaagtgcctttacctagtgagccaccttaccacccctaaggtcctcacttttaaacattagaaactaattctaacgttgacagcagagcagaagccaaataaagcatccatcctgcaggtggccagttttataggccatcaccaggcaaatgctgtcataatcatcacaccttgggccatgatcgtggtgtgcaagccgacttgctgtcctgtgcatgtgctatgaagacgtttccatcttcccagatttgaccattgttaaagtcctgcaggacaattgtgcccaacagaacaccctgaagtgatgttgggattctgaaagcgtgctctccagtgcagccaacatcccaggcaaaactaaattcttgagattcagcaactgagtttgaaattttatttaatcacgattaattaaacttaaatttagatggccacctgcagccatggactgtcaagccttgcctgaaggtgcctcaaccctgcagaaacccagccaggagtcattgacttgttgaaccaaaccaatgtacatctttgatgaaacagtgagtaaggagagaacagagaaaattcaccccagcactggtgaagccatggcaaaatttcatgtctaaatatatgcaatttataaatcaagttgacacaatcctaaataaaatatgttcagtctatctcttgcttataaggcatttcttcagaaaagcctagaaggccagttgcaaatttagaattcctagatgctccaagttctacctcagaaaatggtggtgtggggggcatctggcctctgtcctcacacaggtacctgtccctgtgtgcagcctggaatgggtgaacttaaccaagctggagctcagatgccatcttcagcacccctgtgtcccctcctgtgtgatttttcttcctcttggatgtagtggcattgagatgaagatagcaggcaaaactgccacatgacatgagctcctacattgatttgaggacaaagctccctgtggggacaagcactgtggtctgattgataccttttgggattttgtgtgagtactcacttcattgtctacaaactgagagattttttttttcctaaatggactgaattgaattcttcagaggcaaattagaagcaacattagctgccactctgaagagctggaacaagggataggtaccaatgtgactttgaccaaaggttaataagcagagttcacttcattaaactgcttactcaccattactgaatgtcctcaaagtgtgtcctgaaagactttgtgtgcttggatccatcatttatgcctgaagaattagcgagtagaagataaattacagactacttttaatccatgtaaaaagtcagtccgatgagttccatccaattgcagtcattagtttaaaaagtcaagcataaagtgtatctggattatcatttcaataaaaccttttcagtgatttatgcattctggtactaaagtagatgtttagaagagggataaaagcacattttttttgcacacatgcgattgttatttggaggacagatgctgaggttttgttttgttttgtttctgagataaggcctcgtggagcccaggctagcctcaaactcactatgtagccaaagctggtgttgaactcttgatctcactactcctacctctggagtgctgggattacaagtgagtggaaccacacctagctctgaagtatgttttgaacaatagatgtatctttgttgttgttgttgctgttgttgttgttgtagacatgcatgcagggttgccactggtagtaaaaggcattctgttactggtgtgttacccttacacattatagctccctcttgtggtggaaagggccaagtacacagcatatctgatgagaaggagacagattgggtttgggtggaattagaaagtgaccactgggattggggtggtctgtagggaccatctatgtgtgattcacatttttccctgaacgtagatgccttgttttctacaggattcagtcccccaaagcactgtgatatatgactgcagctgccttgccatggtcacccaacagtttattttgacttcttaacttctttcctattgtggtcagattagaagctagcttgtttaatttttgtatctcagaagtaataaattagttaatatcaatgtaaatattttcctgaaatattcaaatgtacttcccacatcccatcccactctttttatacatggggatgcctggcaaccttgagggtggttttaagaattgctcttcttcttcttcttcttcttcttcttcttcttcttcttcttcttcttcttcttcttcttcttcttcttcttcttcttcttcttcttctccttctccttcttctccttcttctccttctccttcttctccaacccccccttctcccatctctgacatgttttgacttagccaatatctattaggtcaattgaaagagaaatccttaaaacaatactaagagttgaagggcacaccctgccagtgtcccatgattcttagacacaggtggtttgagattccatttgaaggcaccaccttgcctgtgcgacagactctgcaagtcactggtcaatgaaggctctccagcatgacagcttggggcatttgtattgatggggctgggaggaaatgcatgagtctaaacttaacaaatgccacagaacagcacaggggcaagtcagaagcctgggattggagattgaaactggacacaagtgaagcagggaaagagaaacagtccaggctttctctgtccttgtctggggagcagggcaagtggatgttaggatgctgcttgtgagtaattgaaagtcctcctttcttcactttctctacattcctccctgcaggggagccctggattgagcaagtgtcaccacaactgtacaagggtccaatcttgtgactatgtgttagaatatgtagtaaattttcaatcaatgtaagaccaaccaaagctctaaaatattgaactggtgaatgatgagtactccatggagagagataataattttcttgttatgcttctcaaatacattttaaaggtgcaataaagatttcattaaaaggataaaacgtctataagaaaacactaaatgaaataggtgttactaatatacagcttttctttgttcagatgccaaatgccatcaattaggtgacttacaagcaatgggggtttgtggctgagaaatacaagatgaagaaaggccttggcagcttaggcttctagtgagggaagactttgtctctactgctgagctggtaccttctcaccatcgaggaagcatgtgtgctcatggcaagagaggcaagcagactcccttttctcttttgtagaggcacatgaccttgtcaccccccaaagtccctcctcctcctctgaataccatcaaaatggaggaccaagcttcagctgtaagtgttaaagaaaggaaaaaggaaaaggaaagagtcagaccacagacagtctctgggtttcctactctgctgatctgaggcatctcattattacaagtggatgttccatctgttaagatttgcagaaggatgtgcttccagggctacaaggaaaatactggtctattggctatccgcattcattttaatgaaaatatacaaacttctgatttgtaggaaattctgcaaattttttctacttctatctgcaaaaatttaaatttcacttactgtttatgtctggggctcggacaatgcaaagtgatttagtgactcaatgtggtcctaccaaatcaggtgatgtctaaaaatttcaaagaacacaagtgttcatcatttttctttttaattggtagaatcctattctcctcaaaaggcaaatgattacatggaaatatttttccatcatctcttgctgaaaaaaagcctctttcttagaaaaaaatgccaatacactgtatgaacattactcagtcatgcagacagcactgatcctaaatctacttctgtttgtgtgggacgatgacaaagccacagggacagtacatactgaggtttaatgcactttctgccttcagtctgtcatttggtccctggggaggaggataggagattgcagagatggcggaaactgagcaaggatatctgtggggacactgagaacacactgtgtgcaaagccagatatcaaggaggagcacagtgtttcaagggggctgtgaagagttctttgcaactaaataaggttcctgtaagggtgtggtagaagaagaagcatcacgggtgccttgtgtaggatattaaacagcacggacaataattttggtgttgtgttagttaccagtaaggattaaacttggcaattttaaacagagtccagggtggaggataaagagcactagggtcccctccagcacaacaaaggcaatgtgtgattaaatgcatgattgggagacatgtgcctctcataatagcaggagagtttgtcatggtcgaagccatcagaagcatcttccagaagatggaaagattattgctgtcctttgaacagaagaaaagacagtgtttccctaatggtgtgttggggacttgcattgtttgcaaggacaagggttttcaggaaaggtcagataaggaagagttgacgctgtgcacccatgtgtcctcaaggaggggggttaaataatagtcagaagtaggcaacatgaatcatcccatcagaacttcagagtgacactttaaaggtgttataagtacccaggatgtgtctagactagaagcagtaagctacatcttgtccagataccgtcttctctgggtgccatatttgccctccccaccacttcctctgctctgaatgactgctgcccacaaggagcagacatgtgagtggtgatcccagagtgctgagtcagctacttctagatgccatctaggctgataaataccatggaatcttctacaagctcagattccttggaccactggcgtgaatttcgacctttggcttaatcagttctgagacaagaatttaactgtgccggaacttatcccttgtctttctaaatctaacaagaagtgtgtttcttacctctatgcacccgtgtgggagaggtgctgtatctttgtgggtatgggtgggctcacccatgcatgtagaagccagacttaggaatatcttcctcaaccatttctccaccctagtttcttgaaagcacatctctcattgaacttaagagttcaccttcttggctaggctggctgagcagtaagcctcagggatggatacacctgtctcagttctgtggttacaggcacatatactgtgcctggctttttatgatgatgctgggtttgaacttaggcacttaggcttgcacagtaagcaccttgcccactgagtcatctccccagaccccaaatatcacctctttgatgagaggaaaggcaattatgtaaggaattcagcatgggcccagagtactcctctaggaaatagagtgacatgaagtctgtgctgggagtgatgaacatggttatctgccccgttagagcttacaagaggagaacggaaggcaagcaatgatgacttgaccattagcaccgactgttacttatgtgtggtgctcctcaggagctggacttcagaggggatgctttaaccattgagtgctagtatagtgattcgacccttctgagaagatgcacacaagcaataaaataactctgatgccaaagcacagactagatgaatgcattttcgggaagaaagccccgcatttgaagttcaagtttactctgcaagatgtgcagtctccgtggagaacttttcttcccacctgtccacatctgacagcctcacagaatgaattagtctgatttttttttttttttttttgcataaatcccagaggctgtaaccacggagctctcagaagcccagttcctctcctaggtaggtttccgcttttctctgtttgggaagcagttgtttttgctcaggttggtggcgtgtggccatctacacattgagtgcctgcatctccaatctcccgggtcagtgtgagccggtgctgtaattccactccaggaagctgcacggctgtttctgaactgaagaggaaaagccaaagaaatgtgattgagcgctcggcagctaaaatgctaaatgaggggcccgtggttctcagaccatattccatgggaaatgctgagagcgcaagctgcagccctctcttttcgctcttgggttggctgattgccagggcatccaggccagcaattgagggactgaaatataaccggtggcgagacatttgtaccacacaagacctcggaaggctccagtggccgtgggaagcagcagatcagcaccagctggggcagctagcctctgcaaggcaggagcatctcatcgagatggtaaggcagacctgtttgtaacctggggtcggatgattagcagctgttggcgaccatggctattggtagcctgagaatgagcagtcacttgagctttgggacatgatcaggtatccaggggaaaggacgtccttcacaccacagcctgatttatttttcttaaatgacaccttttatgccaggggtaatgggtaactatgccttgtaattaataataattagtaatgagcacttgctggtgtctctcagggagggaaacttccaagtgacctggaatttcagccctgcctaaaactgtgtctgagagggtctttcccccagaaaatagctttaatttccatgctactcttcaaagacctggtgggtagtcatctcaatgttttcatggaagcacagatcctttgtcctgaggcagctttctttcctgcctcttgagttgccagtgttctgtgagcctcacactctcctgcagacactccacacagtactggagaaaacttctaagtggttttctaactgttgtgtgcaggtgacggcagcaggatcctccaggtccagggaagctctatgggactttgaaggagttagctcaatccactccacacattgtcagagccaagtgcaccttgccataaacacagggccttagaattcgcagggtacagggcaagaggctgatttgtagtctgtttctttgcagcttttctaactgctttgttagttgtgcttgacacagggtgaggggggaaatggaagaagaatcagtattaacagtgaagcctctaggtgttttctttaaagaattaaagggtgaaggatgttgtaaatagcaagattatataacatttaaaaggaaacaaaaactataattgcatacaagggatgcctgaaatatacttatctaactgcacagctgatgtgtgggaaataattattctgtttataatccagatgaatgaagagactgttgatggagtgtggggatttttagatacgtgtttgtcttcccaactattcagaaaagtggaaactgtaaagcagatttccagagatacctcacttcctttgctgtccccctgatcagtccctaggtcactcctaagtatgcagatccaagaaataaagccacaatgacaaggtcaaggttctggttcttttgtggacatctgataccatttattcttgtaaacattttagcagcctctttgacctgttgagaacaataagtctcatccatttctctccagccatcagggtggaaagacaaaacaaaacaaaaacaaaaacacatagtccactttcccagcctggagatgaaatgggactcacagtgctttggatgtgttctgctggaattcttgaagcatagtgactttcagttccaaaccccccaagaacattcctttggggatgaccaaggaccagactgaatgtagcaagggctctaccaacacactgggcacaggcacaggcataaacacaaagtcagccttgcacagttcaggtggaagatgaggaggtagccaggggctgagatggatgaactgcaatagtaaacttgctgaatcaagggattctgatccctagtgacagtgtggacttaacctttggagttgggaggaagctctaatgtagattctacctttgagatgattgtgtctagacagcctgtgggtatgccaattaattgagaagtttggaaaggattccctagttatccctagtctaaatggcttttctattacagggaagactcctaagcagtaatcctagttcttgactgagaactgtgagttagaggcggggtagcctgtgactgaaagggaaaaccagttcatcatgaagtcctttccattcgggaaggaaaccaatcaggcttctcatcacacaaacctgcccaggtttcctgcttcccagagagaaggcacagcttagaatgttctccttgacctcattacaatgcagaacttgtcggggcttgctgtgtgttatagcaaaaactagtccttccaggactctggtctctgattccttttaaaaatttgttttatttagaaatgtaaataattaatccatcctgcaagattgcaaacaatttagttatttcaaagcaaaggaaaatcacggatgctctccaacagtagatgacaaatgtgaactcggtatacattttatctttctggttaagtatgtattttagagttatttagatttgcatcaatgggagatatgctgaagtgcttttttatggaagcacagctagctcttctttgattttacattgtgtgtgtgtgtgtgtgtgtttatgtggacttgtatacacgtgtgtgcatgtgtgaggaggccagaggttgacacttattttcttcattaatctctcttcatctttttgttgttgttgaaacaggatctcttactgaacctaaaactcacggattagatagactggctgaatagtgaactccacctaacctctcctgcttcaacactgggaatttcaaatgtacaaacttggcatttacatgggtctgcatgcttgcacgggctgtcacttttctaactgaaccatcttcccatactgaatccctattcatctcacagtcttgcaaccctataggaggagagcccggcctagatgacccttggtagtaagttaccaaatcttttgtgatccagcctcaaaactggatccagcctctttgacatttctcctctgttcccaatgtcacctgcttgagtttcctgtcattagtgtgttacatttgtctggattggttcatacaatgaaataagtaaaacaagctagctttgtaaagaaagagtgtttagttagctcccaatctggaggttcaatctgatgccaatctgagttggcatcagctcattctggtatggacttcatggtgaacaccaccatggtgacagaaatgaatatgagagtcagaggccatgctaccaggaaggaaggttgagatcttattgtcagcctcagcttttatagaaaattgttctattgaggtctgagtcagggtcctacaagaactgccttgattccaacttaaggctcccggagttccaacttcctcgtatgcttccctgagaatccaacacacaaagcctttggggaaaactgcatccagtctatccagactaccatccaattaggattgatgggagacatgaaaaggaaaccaaagcaggcagtgatgtgaaaaagacatttgcccacactggccactggtcagacgtgcagcttgtgaagaaacaaaggtctgcatgggaagcaagtagcacaagaaagtgaagtaattgccccttggaatccctgcaccactagccaggggtcctgctttagtcttttcaggttgttacaacaaaacacctttcattgcgtcccttacaaacaatacaaaatcatttcttacccttccagggacctcaagtccaaggtcacatctcctgtacctttagtgtctggtggtgcttcatagataatgtattctggccgtgtcctcccagggtggaagaggctatgttgttctttgagcttctttataaaggtgcttatctcattcatacagcaaatcccataggacctcattgcctcctgatgcccaccttatgttatcaccatactgcagattaggattcaatgtaagatgactgcctgaaaaagaaccaatcagataactgcagcatcttttacatagaaggttctctgtgtggttgattaaaaaattaaaatcataagtaatggaaggaaaatatgagagtatatgtctgcgtgtcatatactatatcacattgtatgtagatatatctatacatgctatatattattttgtatgttggaccatagataacagtcaatagagtgtatatcatatagttatatatgggcatatgaaatattttcacacacatatatttctctgctttctgtcattgagcacattatacacacacacacacacacacacacacacacacacacacacacactacgaagtcagtcctatcgcttattacccaaagcctaatgaagtgattggatattgacttcaacaatgtagtgtattctgggagaatcctgtaggctcaaattgtgaaatggccttttgattgtgtttccaagaacagaatgtggacttggaggatcagaagaatggagaaatatagaaaattgttcacatgtccacaggttttagggttggggctgattgtagaggacaaattgggtatagccagaaattagtgatgacggcagtatttttttcctagtgacttggctaatgaagggaaagatgtgaaggacaatgagtgtgtgcagaagacctccttgtccccaaccccaaaccagagcacattcgataaggctgtgcacagtctcaagaacacagacaagttggaggctgttgggaaagaggaaccgaatgtgttgtttggctctgagtttcttcttaaagatcgtgccaacagcactaaaaaattgaaacacacatgccaatcatataatgagagcaagtgtttctcttatttattttttgttgtatattgagaagggcctaatcatgacctgaaaacaaacaaattggtacttgattcatattttcatctgatggagcagctccatggatactgatgatctctaccgtggacgctgcactggtcccatccggtgaagagacaaaagaacactatgaattggtactggagaaaatgtcattggcctagttgatggctatgactctttagcctgatgctgagtgtaaaatcagtgtgacagacacaagacttagaaccaagtcattagttacctgacagctagagtttaaatagatgtgagacaaatgaaatctctaaagggatgctgggaacatttgttcatgtcttcatccctgactgcagctgaaatgcgtttccctaaaggggagcacagcagtagcacggaggctttcttggctcttttaggttgagcttgcaccgtcgtcccctctcattctttattgatttgcaccacaggctcctgttagtgttcattggacatcaccctgattaaatgcctcaacagatgaataatcctcccaatttatgacctattgctataagaaagacttccctgggtttaattcattgattgcagagactctttgcaaaactgcttataacttaactataataccagtgaagaaaaaccaatacctatttatccaatctaacacttatgagaattgcctacgtaaatttgtgtgcaaatgcgttaacacataatgaactgttttttaaggcataggaaattaaatactacacaaaagtggagtgctgaatttaggacagtaaacatttcttctccctgcccatcttcttgatttgtttggcatgttgatttacttaagcagggcctttttagtaaagatgatctgttaagttgacagaagaactggagaacactcataaatcataattgtacagcgcacacatttgcgaaatgaacacccagctcagagaatacgtgatggctgactcctggaagccacagtgcagcctctcacagtcctgtttacaaccctcaagtccaggtatatttagctttatatgccccctttttgctattacttttaaaagtaagtggatggtctcattgctcaaaatttcatcagtggatgctgcctgtatgtagacagatatgaggactgagcttaccacatggctgacagtggtgaaactggggaggtattttagagttcttattgttttctcttttaaatgagtctccatatgagcataaatcttttacaaagaaaaaatcatacaagcatttttcacagggactttgttgcttagagtaagccctcgggatgccctagattcagttgagcccgaacaccctgggtattccctgaaagaccaagaccaggtccctcttggacgccagggattgggttttgaggccatcagagagtccctgagtggccagcagaaagactattccctcttgccttagaatgaagctcagggctgagcttgtaaaagtaccagagacatttaaatagaagagataaattataaattgcaaggactaaagtatgtcacaagttaatttctgcatttctttataagaactcaggaataattcaatagccttttgaggactgtcacactgaaatataatggatgctttggccttggcagaggctcggttatacagagttgccaagttccagcatcagccaccttggacctctgagggcttttctctcagagattgctattacccttggccctcgttgttgttataattttgtttgtgttttgtttcttcagttagggtctcagtgtggaacacaggctgtcctggaactggtgagtctgcctcagctttcccttctgttgggattgtaggagtgaaccaactatcatgcctagtttactagtgcttttaaatgtgccaaagtaatatatactcaaaaaccaggaaatacaagtttttgttttactttaaaggaagatgggaaagagcttgtaactccaaatgcaaaaatagcctaacatgtaataataaacaagagaagctgagcaagccaagtgaattatgtatatttcccctgagcaggagatagggctcaggggttaagagtactttctgctcttccagaagactcaagttctcttcccaaaaccccagtcaggtgattccacaagctgcctgtaactccatctccaagggatccagcatacacacacacacacacacacacacacacacacacacacacacacacacgtacatacatacatatatacatacatacgtacatacatacatacatacatatgcacacacacaacctttaataaataaatattttctttttctgatttctaaaaatgcccatagtaattccagaatatcagtagcatgctggaaagacaagtgagatcacccaggtccatcaagtgctggctgcaggctctgctcttatacatctacacacacacatgtacaatgtacacacatgcatgcgtttcagtaattgccatgggtaaagtttccatttctactaaactgtatcctgcattttgccttatgtcattaccacttctaatttgtgctcttggtgacactattattcaattgtctatccctttaacagattgtaagttgccatgggtaaggaccatggcccctctcataatcttgatgaccacagcatgctgaatgtttatacaggtatttcctactgaaagttgagtgttttacatattaattaaccaggaattttttctgcattcatctttcattccattccaataaacagttctttatcatcattttaatgcacataaatgtctttttctaaattttactttaaatctttttttaatactaatactacttctttgaacatccaaatctcagcagttgccaggcagacctgataaccactgactccacatcaagggggcaaatgaccagattttaaagggttaaaccaagtgtggtggcacatgcctgtcatctcagtacttgagaggtagaggcaagaggaggaggagtttaaggccagggtgcgctgtaagagacagttaacaaaagaaaacattttgaatagactggtggacaaagccacgggagggagcagggagatgaagagatgaagacttttgaagaggatagagctgtatgtttagtttgtgggttatgtttaatctgaacatagagtgggggctaggagtcaagaaacatggacgggtccagcagactttaacctcagatgctttgtagcccaaatctctgactcggaagcaggaccaccttgaagcacatggttctcttatccagctttattattcctttggttctgctggtccagatgtaatggatttttcaaatgggttataatttaccctttgactaggcttagcatacagtcagccttgtggaattaatgatcagtctctaagcgttgcacactggtatgatgatttaggaatagtactcaggagcggtggagcctgtctacccttggtgtgcaaggtatcatcattccaactactccctcaggatagcatagtgattggtctcatgtaagtcatgacccactagtagcctgctcttaagtttctaactactgggaaaaccagcccttgctcactaaaattactttaaaaaaatcacaccactgcgtaaaacaggacagatcataaactttacttttaaaaccagaacttgtctagtcaatctctgattgaactacatcctgggatttgcttgccagtattgaggacaagagaactatgaagaccctgtttaaaacatttcatatttctactcattattcacagaggtatttaaaggattaaaatttagaaaataatcacacagtgctggccccagcatttagtagctgttgaaaatgtacaatgacatcaagtctcccaaactgaaccctggtcaattcagaacttagggctacctgaggcttccgctattcctgcctctctttctctcaatacgtatgtgacataaggattttgctttgcttttttccctcttcaaaaatgtgtttaatatttagagcaaacacagccttattttagagagtggggtttaaagaaaggctttgaattttatggagtttgctacatgtgggaagacacaggggacacatacattcacacctacagtaatagcgtgttgtcacagccaactgggtggtccttgagtttggatggttaagagtccccccaaagcaccagtgaaaacttgatctctggcacagcattgtgggaaagtggtaggactttcagaagatagggcctaagtagaggtcttgtccctggaatggagagtggacctagacccttcctttccttctctcttcatcgtaagctaagagctttgatccaacatttcatgtcacaaggatgaccctcactgcagactgtagagggccaatgacataggaaccaaaatcttcaaaaccgaacttttctgagaagaaaatcaacactttccttttcccaatttgcttattttgggtgtttatggaagtaactaaaagctgaccaatggctgggcagaaacagctatgtctgtaggaaaaggcgccatctactcagccataacagggagagccatcttccttctcccccgcttcccttgttactgcttctgtagcaggtatctgtggcctgatgaccgctcaccagctagcaagcacttgttcccaccacccagacatacactgtatactccattttccttgctttctcagtgattgggtttgaagactgggtcagttgcatgtagacttttccaggcctgccgtaggcactccttgtatgttcctggccactgactggagtgcttgcaagccatgctgtgaaggaggcaaagctatcatcagcttcagtcttcaggtggccctactaagtaaaatccccttctcctgcccctgactcgatttttgcatgagcaaaagtaaaccagcaaagccattttttcatctttctctctttattgcaacagtgaaatgagccttgttttatcctcctaagtttagacttcataggctggtgaagaggctgtattaatgtccagagaagtaaggtctctgctttcagcttgggtcttcatgggggaaggaaacagaacacgtggacaggataagcagaaactttacatctgggaataagtgctacagtggagtaattgagcaggttgttaagtccccgagaggccacctgactttgtgtgaaatgtaggtctgtactcttaaatagcagttgttacattgtgaaaggaggaaactggtattgatgaaaagtcagaggagtgcatgacagcatcccacatttaccttctaaacctgtcttcgccatctccatcaaagctcaaagagaaaaataaaaacatctgcaggtcatgttactctggtggtcctttaggatgtatggttcgggaaagtgtccttgaaggctcttggagatctcaaaggctagtgatgttttcgctcagtggccccaagtggcttcctatcgatttttgttccctttgatgcttttaatgatcaaagcaaaaatagcattgactgtgggaggtgggggggtcccatgaagttggaatgaccctttgtgaagcagggatttgagagaggtacttcctatttccttaacagtcttcaaaatatagataagggatggggtgaggggagggagagggagcagggacttacatgtgaaacaagcttgttccctaactggaactaataaataaatttttaaaaaatatggataaaattaggactttgattttacattgatcaaacatactgcacaaacgtacctgtgtcgcaggttaaaatcttacttatggaagatatttaaacaaaaacaaagatatggaatcagagcaaaaaacctaagttgatttttttttttttttttttttttttggtttttcaagacagggtttccctgtggctttagaggctgtcctggaattagctcttgtagaccaggctggtctcgaactcacagtgatccacctgcctctgcctcccgagttctgggattaaaggcatgcgccaccaacgcccggcttaagttgatttttaaattattattgtgagcaatcagggtgttctccccatggagagtcttccccagaggggcttctctctctctctctctctctctctctctctctctcttacacacacacacacacacacacacacacacacacacacacacacacctctgctttggtgtcagctccattctgtcatccctgggctctgtctgttccaggttctcggcatctactttaatgacgtgaaggacacacaaagtgacaaggagtttactcagaaacaaagtcaaacacatagaggctacactgccagggagcagcagcttctacgttggattttctcaagagcccctggccactgctagaaacttccctctgggggccctgaaggaggagttggttgcatggggtgggttgggtgctctgccttactaggcagtcttggctaactgcgtgtgtccttttctgtgatgtattttgttttaatcgtgtgcatactcagtcatgcacaggcacagggtatcaaatagggagctttcccctaaaagttcacataaatgacagtttgctttaccatacaaacacttaaaactactccaggctggactgctgcactgcccctagttccaagacaggtcctaggatgggtttgatcaccaaggaggattactagagactgctagggtgtttctaagcactgttggggtggagtgtcctattgctttgtgtggagagggtatgtgtaaactcgaagcgggcaggagccatgtgtttctgagctacccctgcaagctctctgcctcagtttccctgggttttccccagaagactcctgcttgcagcacactcattagtaaatcagtacataagcatgtctctcactagactttctgaaatagcagccagatctgggtgaccagagtatctacattgcacccttaggtacccccataagcactgtaatgcacactggtcccttttctgtatacacactgattcatgtctgggagcacggctcatcctggtcaaatttccacttaccatgggtcatgtgaagatacgagaacaatgtcagtaggtagacgaggagtaacaatctgccatcctccactgagagaccagcatttatatctatatctatatctatatctatatctatatctatatctatatctatatctatatctatatctatatctatatctatatctatatctctatctctatctctatctctatatctatctatctatctatcttcttctcatctacacagtcctgctctttagatctagtcttaacaaatttccaaacaatcaaataaacacatatatggcttcaccccatcctcaactacatgttgcctccagtgggatgaatatagccagtgcatccagagatttggggatctttgagaagttccttgttagttttagacatgacatccaaagatctctactcaaaacactccaaaaatgcttgcaactccatacccctactaaagtataaagatctgggagaaagaaaaagaaatataactttcaaatgaaggaaagggaatgctctgccatggaatcaccatttgtgagttacacggtacactaaattgttgccatgacaaaacaccatgactgaggcaacttacaaaaggaagagtttattgggctcatggttccagagggccagagtccttcatggccaggaggcactacagcaggcaggcatgggggctggggcagaaagctgagcgaactctcatcttcacctgcaaacatgaagcagataaagcaacctagaagtgggagaggttgccctggtctcagtgttggcccccaggaatatacgtgcagcaagggtgcacctctaaacctcctggtgcagcaccaccaactgaggaccaggtgttcaaatgtctgagcccgtagggaacagtctcattcaaaacactatactgagtccagcagcacaaaggtgagcttgtggcagtggggaccccagatttggatctcggttctgacagtcactaaacgtgtgtccttatgcaaggcccttttctgtgtctctgtttcttaaaagtcatcgctgcctcaaaggtgaatgagtaaatacttatgaagtgcagacgtatttataaagctggcatgtagtatttatataagctcaattaactctcagagaacaaaggtaggaagggaagtgatgaggatggatgagtcacaggggtcagttttcctagtcacttccttggcaagcaggatcatgtgaccccaaaatgtcaactaccccagaatctgcttgctggaaagaacacctggttgtctccagtgtcctttgccacctgtgagaaggacatagggaagactcccccttagatgaggatgccctaagtcaccactgctctcaggcccaagacctggacaccaagatctagaatgctggttccttgtagatgatgataaagaaatatttgatttttgtccccattgcctgagataaccatgtagagggacaaggtaccaatagagtgatgtaagtgaggagtatgctcgacatacaatatagatacatggatttttttttagttaatgaggccctgggttgcataattgataataaaaacaaaaagtttatgccctgcctaaaaatgacattgttgtgtcaaattgtatttgcattctattcaagtaatacttgggaatgtttcagataaatactatgtcacccaaagctttgaaaaaggaacacatgatgtctctctgcatactctgctttagtttgttaaatcttccctagtggaatctgacacggtgtctattttctggacattggtttgttctatgacatcctcaactaaatagatacttcttcaaggcaaagacatctgtttcctgctgtaccaagttcccagattatgaataggaacacattcaattgaatagatagacagatagatagatagacagaaagatagatagaatgatagaataataccttcagtatagtaaccgagaacaactaaggcactgggaagaagtttagattgcactatttacattagaagtgaggccaagctggaaccctccctgttatagcattaaacattaaacatgacttcctgggggcacaaaacattctagaaaggactgttgaaaaagggaaactattctggggggtgggcatgcagccatgtttactaaacacccctgtaccttttacagttacatgtttcagcatccccagtggaaagcaacggaacaggttaacatgagttttgctttaaaacattcgattagcagaagccatagtgtgtgagtcacttcaggaaaccagtatgtactgccccattcctgcagaacgccttggtgtcttgttttgtttccctcctgtgttttgtggtgtgtgtgtgtgtgtgtgtgtgtgtgtgtgtgtgtgtgtgtgtgttattctttttattgtaaggaagaagaaaaggattgacatttttgggtcattttgtgccttgccatctgccactgaagttttgacaccagggagagatgggcagcatgtcaagttggcagtatctagaatgttatttccatctgtaaacgtcaagtgctgcattgcagtctcaatgtacagtgtcacattttacttttaaaaccttccttttgtctcttagaactttctcctttcctgtggctttacccctccacccttcatttaggtttctggcactgcaaatacatttgggaacaatggacaaagatgatctgagatggtctttgtcatccctgtttcatcctttgctgggctccaccctgtgacctcaaacactcagcagccagccaagctgtctgcctggacatcttcctgggaacacttgaaataagaggtgcatggtttttgctcctttgtagttcagtagttatgcctcagctggaatgtctgccgataaaggtaccaaaagtcatcaagagggctagcttgctagatggcttatttggcaaaggagtttgctgcaaagcttgatgagatgagttcaatcccctagatccatagatccatatggtagaagataattgattagacaacattgtcctccaacctccacacatgtggtgtggcatgaacacacacacacacacacacacacacacacacacacacacacacacacactcaaaaggaagccactgagagcttacacttcagcaaatggcaagcttctaaagctctgccctccatttatgagcacagagcaaagaggtgggtgaagaccctcctatggagcaaagagtccttaaactcatgagaaatcccctactgcagcagcttctctcctggctttgtaaggagctcatttcctcctttggtttccttcattctccttctaatatccattcttagctgtgctggaatccccatgaatacttttctattccatcccccctgcccttcccactcatctttgagagctttgagcttttgtgcttatatggtaagtgaaaagcatagaaaaaaatattgcattgtaaagtagcaccataatactctccaaagcccattgtgcaaagcacataatagcattctcaagtggggtgacacacacctgtcatcccaatatttaagaggtggagcaaggagaatcatgagtgcaaagccagccttggctgcaagataggtaggtagatagatagatagatagatagatagatagatagatagatagatagatagatagatcagaggcttgggacataactcacttggtagggtgtttgtctagcatgcatgaagctctgagtttgattcctgatatctcataaactgtgtgtggttatgcacgtccataatcccaacactcaggaagtagatcaggtgatcagtgtcatcctcagttacacagccagtttgaggctagcctgggatacattttgagatgctatctcaaaaataaaaagcaagagaattgggtataagtcatgatggggtattaattatagcaagtagtttcgtcactttatactttttgacttccatcatgccctcttccatgttgctggtgactcaggtttcacttcagctcctggatgagcacacagatggtttcttagattcacttgtggcattccccgatagtcactgactcaccaacaggggtgggactaagatattgagtgacctatgtaaccacagatgcagatgcttgacctacttgactgaactctccaacttcatgatctgctaacacaaccctgacttcatgatctggttttcattgactagagagacaatgaaatacttaagacatttgctttttaggtcattggaaccaaagttgacctagatgaagagctaagggttacctcagaaataaccaaatgcttgactattcctaactatgatgcaaatttctgtggctctagtggaaaaagtccaatctgtctgtgaagcaggtgatggacaaagttcataattgctatgaatttctcttgcgtttttttctacttgaaagagtaaggacacatttttgtcacacaagctgtgaatgagaaacatagctgggttgtggtgtataaagagcaggttccactcaaacccaatccatccactgagacccaggagggtaagttaggaggagcctggtaaaagattcaatgactacagggaactgactggcttttatctgaacattattcaggagtgtttcttttctcttttaaaagaggtctctctatgcatctcctccacgggtatttgtattcttcaaagagaatgggttgacctggacttatgtggtttttcttaactgattttgttatttggcaatttcgtgtgtgtgtgtgtgtgtgtgtgtgtgtgtgtgtgtgtgtgtgtgtgtgtgtgtgtggtgttccgatagctatctctctgttaagctttatcttcctcctacctctgtcattgccctctcacctctacctgtcccatccccaggatcatgactttggttttggtccattcagttgagccagggtcatctgtgtgatcattggactggaaccattttctggagcctagtggagccatgacttttcacaacaatatttgaacaaaatattgtagatcaaacctaagatcccaatactaaggaagtgtactaccattgagctgtaccccagtcagtctttttttttttcatatatcctctctgctggttggcatgggtttctttttattcttcgaaagtctttatggattcctatgtaggggtcttatgtattcctatgatatttattacaagctaaatgaagggtgtaagatagtatcaaaaattattcttctgtaatttagttctctgtttactgctgctatataggaatacaatacaatgttccagctgggcatagtggtacactcctttaatcctagcacttgggaagcagaggcaagtgaatctctgtgagtctgaagccagcctggtctacgtagtgagttccagagacagccaggactatatagtaagaccctgtaccaaaaataaaataaagtgttctttataagcatcagcaattcatttcagaagattctggatttttcttccacaatcagatcagcagtaataatgaatgtttacttccaactcctaattttccctcacattggtacatcctgtgatatcagtacaaaacttcacagagacactgactgtgcatattcctttataatttctatgaatgttgatgaaaactatcaacattcatcatgttgtaaaaaactgaaaagtaaagccaagtaaatttaatgataaaacaaataaaatcacctggaattccactagccacagattatcaatacttaatatttttcaaaatttataaatttaaaacttctaactctgcattccattatgtagcctaatttttatacacaagcacatatgtaacagtaaactgggatccacatataagagaaagtgtgatgtttgtgcttagttcatacagtttattctcaattgagggttacagttttgtgaggtgaaaagggttcctggatggtggtgacagttatgcaacactgtgggaacatttagtgacacttgtcacatgggtgatgtatgatgtctgtatcttaccacatttttgaaacgtgttggaaacatgtgtaatgatttggaacttaggcacaaatcttgtagttggcttccaggcacatggagtcaacagcaccgggggaaattgcgggctcaggatcagttcctgcttccagatgcaaaatgaaataaatgcagggcatccatttcagtgcctccctctaaatgccctctgagaaaagcactgtgagaactcatctcgacttggtgactgttaagagctgggtgttgggaacccactatccaactctgaagctgggcaagcaagctaaacctttttggggaccacctccatcaaccaggtgccaggctacaggtataggctctgcaggaaggaagggattgcctgaatacagaaaggggtgggttgcctatgcagatagactaggcaaccaataatggacataagtagcataatggcaagcactggtcatttctgagtggtatgggcttgaatgtttatacccccaaattcttatgctaggattcttacctcagtgtgatgttatttggagatagggggcttttgagggatggtaagattcacatggtgttatcagggtggagccccatgatgagaggagaagagacatacgaggacacttggagaagtgtcctttttggctttttgcaagccaagaagtcattccctagaacctgaatcaccacccctcttgatcttgaacttctgattccagaactattagaaatctatttcttgggggtgggaggctggagagatggtgtagtgattgacatcactttttgatttttttctgaggacctatgttcggttctcagaacccacatgttagctcacagccatccataactccagctccacggcatctagtgctctcttctgacttctgtgggcaccagacatgtatatgatgcacaggtagacaaaccgccggcacacataaaataaaataaatagatctaaaagttaaagtaaatgtttaagaacgagaaagaaatgtatttattgttgattaggcttctgtcactttccctgagactgaaggcttcttccctaccacagtgccctgcttggacttaagcagtggggctgagagaccatggacagcaaccctgaaaccaaacctttccctacactaagttgattctctcaagcgtttgtcacagcaacacagtcatcacgacttcttccttttctgcttcttcccctgctgccactttgaattgtgccatttcgtttgtagcagtccaagcagacaatgacatgtagcatgtcatatgcagagcccagggtcggggcaggagtctggggaactgcaagaaatctcagcattatttttggatttaagagacatattccaaagtgacaagagccactgagcagatgtttaggcatcatggcctaaggctcagctatgctttctgtggtgaaggtagggaccagaaaatattggcttgcgtatctttggtagatgtggcagaaaattgttggtggggaaaataagtttgtcttggaaaggaaaaaaatgtgttcatatcataaatattttcccttggagattattgaatggctgaatgtcacttggaggaagaataggggtgctatgcctattttagtccttctatttgcatctggccttttactttatggtcaaatagtcatgctgacttaaacacacagaagtggtgattaatcttgattagaggaaggaaccaatgatttagatgctgttgggaatgtacttgcaataaaagtaaagtgtggcaatcaggaaagcggttgaaatagttcatgaggttttcctgggtggttgctgccctctggagccatgttgataaacacgtgaggacccctgtcattgttgctctcagctcctctattaaacacaggctgctgatttgcttttctgtgtcttaacttatttctggaatgcttttctactcacccctgagtgaaatgcaaaagttctcggccaagccaaagtcaaatggcttctggctgactttaaagatggactgcaccagggaaatttcatttggcatgcatggagggttatgtgaactttctcaagatcagaggttcctttcatttcaataggacacatgacaccttgtttctcataaaatgaggggttttgttgttcagtgttcacagaaccatcttgccatcatgactgaagggactatgaaaaagcctggcaggaccacaaacatcttcagtgaagggtggaggcttttgtctgagataagctcattgcctgggaatcagtcaaggaggagcatggccaccaatcttggctagataaataattgccttttcttttgttccactgtgtgcctgtgttcattattaccacagctgtaagttagtcttgactgtcctccaaagtccatgtgaatatttggtctctagcctgttgaggctaccaaaaacaagttcagggagtcattcagaggtgggtcctagttagagggaactaggtcataggaacataccccccaaaccccaaaaaggatattgagactctggcccctcctctctctttctttgtttctctggtttccctaatgtgaagactttctctactatgatgcgctgtgcttagacccaaaacaatggagccgagtaaccatggacagaaacctctggacccaaacctctccccatattaagttagttctctccagtgttttctcacagtaatgcaaatcaccaagacttcttcccctcccccacccccttactgctacctcttccagccataatttattgcaatgaaaaattccttctataaggacaatttttcagtatagaaccatagtgtggggttatgtagatctgggaaaatatagtcttgggagctttgtgtcacaggagcagccaattaggttaaatatgatgctaatgaatacacaacctgcagctgagagctgagccaatggggccatgcattgcagcccccaaatggagagagaacctgacattttacatagctagacttgcttggagaactgggctaatgtttcttatttgcaactgaagcaccttaccccggtttctaactactgctcactaggaacgctacctactaagctaatttttgtttgagaataaatattggaagagtggttgtgttatttttctaaccacagaataaatgtttccccatatagagaaaaactgtgagtctgcaactggtttgcaagccaaggcggtggaaggcaaactaggaaacgatcttggctttcgcttgtgtctataccagatttcagcaatgagcattttcatttattttaaaagctcactgtatcagagaatctaaaatagctttccttggaggctttgatggcagcctgtgcttccccaagtgtctgttagaattcgttatgcctgcttcaagtggaggcaaggggatgagagagaattatcacagaattgtaagtgcaaatttctgaacaactcctagggcgaagtggctcccatattagtttgggagaaatttagaacagttttgatctgattatattttttccttctttgttctccatctcttcaacttttcttgtcctttagatttcaaatctctctctctctctctctctctctctctctctctctctctctctctctctctctctctgtgtgtgtgtgtgtgtgtgtgtgtgtgtgcctgtgaaagccaggagagttacagttccctgaagctggagttgtttgtgattgtggaacacccactgtaggtcctcgaatggaactccagtcctctgcaagagcaggaagcactccgaactgctgatctatctctctagcccctgttctaattatttcagtctagagaaatgccatttaccaagaacactaaagacagcctcttctttgtatttttttaacctgtgtgtatatgatttgtatgtacgggtatgtgggtgtgcaggtaacaaatatatgtgtatagaggacagaggtcaacatcagatatcgtccacactcttcacctcatttcttgatagagtgtctttcactgaacctggttgcactgattcatttggctgtctggtcagcaagacccaagtgctggggttgtggccacactctgctcacctggctttttatcatgggtgatggggactaattaggttctcaagctttctcaacaggtactgtacggatggagccatctccccagcccagaataaaaacctctcctttatcacatctgctcattacagtgctagaaagggacagcaggatggctcagtgggtaaaggtgctttgtagacaaatctgctgacctgagttcctgcctcagacccccccatggtggaaggaagggtgttgtcttctgatctccatgcacatgctatggcatgaaggagagcatatgcatgcacacatatgcacaataaataaatgtagaacaagtcacatgggtgggaacagtgaggacaacatccctgggaagcatcagtcctcacctggtgtacaacagcaattgcagccactgccacaggctgactgctgttccgaggttgcagtaggcaagatgaaacaatttcatcaatgctcattgatctgctggaagtgatgcacaggctgctgtgaagacagtggcacaagaaagaaaacaacccattctgcacatggggagatgctgttttggaaaatttctgggaatttaagattcgaaagtttcaagatgacccagaaagcctgtatgatcctctccatcactggtgttcattcggctttccccacagtggacatgatgtagaatgcatttacgcacccgaatgaactgttaaaagacttccagatgtgtggtgatggtgcacaattttaatcccagcacttggatgcagaggcaggtggatctctgagttcatggccagcctggtctacagagtgagtcccaggacaactagggatacacagacaaaccccatctcaaaaacaaacaaaaaaaccacagacaaacaagccaaacaacaacaacaacaacaacaacaacaacaacaaaaacttccatggttgttaatacatgtgacatttaatagatgggttagtatagacagagattattaaatgttttccatcttttcacagagaaatttgtatgtgctcccatgtataaaggtctataaggtagatattcaacacactcactaataataaataataagaaaattggttttaaaatagttctttgttgcatatagtcttgttattaaagacagaagcaaatttgcacattgatgtatgatgtatttatttatttttgttcgaataataaatcttagtgggatattttatactgcaggacttagagcatcttcagtgtttttcagggttgactgatattttgattttatcagtgatgagaacaatggttcacataaatatatggcatagtttggggccatttcagagagggctgttggaaattcccatctaatcttaaggtactattcatttaatggttattcttttgatttttttcttaattcaaattaggaacaagcttgcttcacatgtcaatcccttctcccctctccctctccctcccctcctcccctcatttaatggttattcttaatgaaactcctgccagccattcaaatagcagcatttagaataaagtattttaatcaaatacattcctaacttgtgacaatataaatatggtgctgaggaatgatgatgtgaaaatattaaaagcctttgttcttcaggatgaaaacatttatatttctaaaagaagagaaaattatgtacagaaaagtcaatgcgattcatagcacacagcatcttgaatctgaactgaggtgttgtaggcaatgttgactgaaggtttggggctctcagacttgtgatgaccaagtgggtgtgtcgtgtgttcggaactaaggctgcagtgatgtcacacagcacaacatgggcaagtactaccagagcacctcagactcactggatgactttgaaataagttttggtcactgtgcattcaaaaacattttactgttgctataattttttgcaactgcaccctaccttcagctatgtgaatggccaccaaacagggagtcatggcccacaatataagaagctctgatttacagactgggggatagctcagctggtatagagcttgccacacaataatgaagacttgggttccgtccctagaacacacattaaaaatgccagatgtggtaacaggtacttactctaccatctctgggtagactcatgtacacacacacacacacacacacacacacacactaattaggatactttcagccatcctaaaatgtcagtgatttagagggtttctggtgttttgtttgtttgttgtctccaatgaagttccaactctgtggctgtttgtctgaacagtgatacagtagccatctaccttgctttatcacttttatcatgaggttcacggcttaactgaagccatggaaccatgaaagcacaaaaatccctattatctgggatgggggagctggagtgctgttacttttgcttacatcctattggctaaaactcaggaacggggccacacccacctatcaagaaggttggagatgcaatttaaatacgttcttgggaggaagaaactggtttggcaaaatattattctctttcccagtaatctaacaacagatttatataagctcccaacctaatctttgttgttcctgctgcatcttttagtgcccttcccatgctttgaatagaaggtcctgtctcagttatgcttaatttaaaatacagagaaacatttgtttagtgagcatttttagctgtgtaggcaggaagaaagggaggaagagagagaggggtgtcaggaagggagacagaaagagggggagtgaaggagagagggtaagaggagggaggaacatacacacacacacacacacacacagagagagagagagagagagagagagagagagagagagagagagagagagagagaatatgagatgtgtgaactgctgcacaaataccctggcaatatactcccataacttttaaaatgcagttagcaattttggcttctacagtaaagcaatagttttgcatctgacagcagggacccacttcaaggacagatcctggacatggagaatgggacttgatgctctaatagatctgaggttccagttagaggggagtcgaggattgtcttcacttttcccctaagggagcagaggcatttggaataaagggtgggagcaggacaagagggatgaagtcatttccattcatgaaccatgaggtggccagagggaggaaatgctctccaaacaattggaagttacatccataattgagagaaggtcagggcttgggccattgcctatcagccaggtctttgaagtcatgggatcagctcagcttacccagaaaagtgcaaaagaaggcaatcttgggtgcattaggggcctcaagaaagctggtggctaaaaacctggcttggcatttagatggtattagtgagattatcattagggaggacacaagttggattgaaaggggttaaaagaaaaatagaaaataataggaagttttctggataatgaggggtgtgtgtgtgtgtgtgtgtgtgtgtgtgtgtgtgtgtgtgtgtgtgcaaaacatatatattatattcatttacttattgtgtatatatgtgatgtgactatgtgcatctgagccaaaaaacaactttcagaattcagttctcttcttccacccttgggtatcaaattcaggccccactggggaaagtacctttacctgcagagccatttcacgggcagaaagcaatagctgtacagaagagggtataaacaaggatctcactctcaccatgagccctaagctgagctaagttgagctgagaaatgctaccctggccagcagcactgctttcacagtaaagatttcttttctgccttccatttgtggagtcaagcatcccaaggagtttgctggcaccagtttcattgtaaagaggagtgtttgagctagacctgcataggtgaggatttagcagatgacgatgagagtgggagaggaatgtgtttcacttctgtaacgaataaaccatgcttctggcaccactccatccatagacactgaattctccagtgctgtgtagagcatcccaccaggcatcccaggtggggcagcaagccagagagtgcccttttcatggagtctggtcttccaaaacgtactgggtatggcagtgtgtgggagcaaactttccgataggagcatttacataccatgtgctgttgatatgaattgctggccacaaggctgaccggttcattcgccttttataaatcaaaaggctgcaggccaaatagcctaagagtccccaggtcaccagtctgaatataaaggtaaaccagattgcatctggaagagctgttttgccaaagtattctgtcctcccagaaatgagacttttgtcattctgccgtgaatcaccttgatctcacatccttccgctcaccattgggctctgctgagcctcagcctaccctccctttgctgactcatttgcatttgttggctgctatggccgtgtgtgtgtgtgtgtgtgtgtgtgtgtgtgtgtgtgtgtgtgtgtgtgtgtgtgtgtgttcaagctaaaatcccagcaatttctaggaaatttacctactaataacatactacacttataaatttctgtgattacccttcacgttgaagtatattttttttctctcctgatgtaacatgaggagctagaagctggcatgggctggaagcaactctgtggtaaatggacatatcagccggaaaaatgtcttgccatgcacttggcagtttgcatttggcagtttgctttgcagcagatgttgcccttctctctgcctcctctcctgcccttccttctcgtggtaaatatgtagggaacagaatatatatatatattgcttttcatttatctgggacaagactagtgctttgcatgaaaacatgaaaactcagtatctctggcgaaaaggaaacagactgtctcataaaaatacttaagaagcagactggagaacgaggacctttagagccagccgaaattagaatcaggtctaagggttgggccacattcctttttgtatgccatgttttcttcaggtgaattgtattatgcttctgcaaatgagacagggggtgttgtgcttgagggaagcaagctacatcccagacacaagctgctaaacacaagtgttaaaaccaaagattctaagaaaagtaacatagacccaaatcatcaaggccaaattaaataaagcaagcaattaattaaagtgtgctttttaaacctatgtccatgggctgtctccctgtaaaggtgagagtcaagaaatcagtcttaagtatgaggaagacaaggtttttgtaactcaggggtagggagtttccaaatgggggatttggtggtgaaatatgtagggttacagaaggagaacaaaataaccaggtgatcataacaaagcagtcataacaacaggtacaatgaggtagtcatagcaaccttttcagtcaaaggtagctcacaagatggttgtgataacttccggaaataacgatatggttgccatttcctgaaataggtagtaaagaattacgtttacaggtgaagcatgacccaatacttgagaaacagaggtttagtcataaacaggaataggcctagttggtctttattataagatggctttcaagcccaagatggaggcagattggttcatcgcatgcagtggaaagcacttgtacttcacaaggattctacattccaccagatttttccctgttttctttagaactggggtcctttaatgcccccagcgtgcatttgaatttactggaagcaatatcaaggacaaaattgcatacacagaaaacttgtatgtaacactacatctatagtaactagaacttgggtctctgagactcttctagatgttcctaactgacacatgccctgtttcctggtcctttaacttccacatcctgtggccaagctcgactgtgatctgtttggtaaatagaaactcagtgatacattgtaccccacagaaacgggtcacatccacatggaagctgtttcttcagctttgtttccagagcccaacctgctgcctggaatattgtttacctattcaataaattgttaggaaatacaaaggcattggtgatacaaaatcacaaaaatggctttattttcatgcagcttaaaattcagtaatgcaagcatcctttccaatactaaaaccaccaggaaagagatgtcggatataactggacgtgcatcctttgttgggttttcttttgttgttgtttactagaaggcctcactatgttgctcaggctgacctggaaatttcagtcttgctgctgcctcaccctctggagtgctgggattataagcattatacccggctgacattcctttaaaatggagagtgttagaatactgtgaatattcatgcttctgattcaacaaactcctcatagcctgaggtacacaccatgacattcattttacttggaaagctcaggaagctttgactggcagatataagaatgagatgaaattcggatacttaaatactggagtttgagcccctgccatgtatctattgagtcttctaatcctggaattgtatctgtgtaagagaacagatcataaaaggcatgggacttttcattgaattacatcaaaagaagtatgtgcagaagcaaacctttgaagagtatcgctaagattattcatggttttaataattttggttccatattgagaaaattgtcctttaatatatcatatgtatacataaaaattgtatatacagtataatctatgttcaaatacgttttcatatttatggggttaagtaataacacaggagtaagaagtcagtcataacacatctcagttactctgtaacctaggcgtagagtttgtgactgcaaaatgacctgttacttcatccagaatccttcccagcaagggaggaaatgtgcacctggggctctgaggctggaagcctgggctggtcctgtctctgatgttttggttgttgtgagaacttgggcaaataatctctcttaatctcagttttctcatgcatgtgatggatccagctcatgatggatttgtgagtcttaatgagatcacagacataaactgttcagaacggtgcctggctccttgtatttctccacacaggccatcgtgtctgcaacatcaatagaaagtccagaaaacccttctaaagcaagaaacaagagtctcagatgcagtgaggaattctctaagcacccctggtcttatttcttgcctgggaatccctaagcaaatgccactttttaataggatttgtttttattatcggaacatcctgtactgtagctgaagcagaaaagccatggattaaactctggctgatataattcaactctgatacagggatgtgagttgggctactgaagctgtttgtaatgcaacaggcaagggtggaccctgaggactcccgaactgctttgtacttgggcatctgtattcccagatgcttacaatcaaattcaggagcctactcaagagtgcactataaactgactgtaatatgggacatcttgaaaccacaagtcacaccactgaccatcgttataaattctgtgacctctgctgaccactgagggaatttctctgttttccttcatgacatgagaaacgtctttcaggtgatggaaacattaacattctgcctacccacaatcaccatgctaggcatgagttgggctgtgctgcaggtctgagcctcactatccctcttgggatagtgagagcttatctttctacctgctgtgtttcagaagaaccttaggaggtagcatgaaagcctgagtcagctctaacttgacggggaactccacatctctgtacaaagtctcactcatttagggatcatttctagctccagccctggaattaaaatacttactttaagtctaataatgcatagacctcagcgaatcttttacagttattccaagttcttattcagtgcaggcattgccacactcctctgagataaagaaaacctccctttggggccctcaatcaagagtgtgtggtcatagcctcatatgtaacaagaagtgttgctgagtggagcagaacacagggagtggggaagatgttaaattaggcaatgaaacagaaaacaaatcctgcacggggagtgatggggaatgtccttctgtgtatgtttattttattggctgttgaataaagtactgttggccaatgaagaagcaacttaggcgggactaggagtcaaggaggattctgggaaatgtagtaaagaaatgttgtgatacagtcaggaagcaacagcaggctgactcatatataagcaaggacaaataggaagttgtcccttttctcttgctcttcttcttcctcctgctctctgctctggagttgccatgtgaacccaggaagacaggaggctcaccaccagtgtcctccataagataagtcttatgattatgcttgataattaagactgagccagcagatgagaaatcctagttaatggccaagcagcatttgtacttagtataagtctctctgtgttacttgggaccttaacatggcggcaggcagaactcaggcgccctggcagaaagcgtgcacatggtggcagggcttgggtggctttggagtaaagacttattgtaacaatggagggctttacaggctcagcctcttagtttaccagaagcccttgaatgggaaaaatagcttgattcctgctcctagaaatgcctgccttccaagagtcttgttccctgcctcttctgggttcatctttgataatggcacttcattttgctgacattgaaccattgaggtgccagggtacttctctgaaaaaaaatttacttaattaaaaaaatatgtgcatatgtgtgtgggcatgtacacatgagtgcagtgcccatacaggccagaagagggagtcagagcccctggaactagagttataggtagttgtgatcactgatgtgggtgctgggaactgaagtatgtccctctgtaagagcagtaagtactcttaccctctgagccgtctgtctagccccactgtgtgctttttgatgatctcactgagcggtctttataaatgccactgctctttataaaccccactgcttgctcattccttgaggatgctcgaggtgtctgtccagtggctacgagactttcccaaactctttgctttcacccccaaatgggtgaaactgcaacacttttcagctaatcagcagaagctcagctctttcagttgctgagcccccaaaactttagagctttgcttgactctgacgtgtgcttatagattacaggcccttgtctgtaaataaacatagaacttttcacagcatattcaaaactggattttttttacaacttctagaggggtgccctaccctaaagtttgctctgttttccccccagatagagaaaaccaagagcttccactttctaccctcagattcttttgagtggtaatggttaggttgcccattcttctgctaaaagactgggcgaaagactagtgaactcccaaagataaaccagattcagacctctgccaagtctttcctggttcttatgtcaaagaaagaaggacctctctgaagagagaaacaaggaattggggtaaagttgattaaggtcttaagtacacactcaagggttgaatgtgagtttcaagagatagtcattgaacatttcctgggattttcaaacaaaggattagcttttagttaagatggggaacatgcaggatcttcctagatcagggtttggcttttctctcagccctgtttggatgtggcatggtatcagatgcatgatgaaaagtgcccaaaaatgccgaggtatttctccagccacatcacctattttaaactgtcaaaggtgcacaactttaatcccagcactcaagagtcaggcagatctctatgaattttaggtcagtctggtctacatgggaagttccagagcatctgaggctgtgtagtaagaccctgtctcaaacattaatttgttgaaggtataagttgccttgtgtaagtccacaagctggtgtctgtagctcaagaattgatttgtggtatccatttgtgtggtataaaagcaatgcaagtaaaatccacttttcaagcaaccaccaggaagccaaaatgttgcactttttatcggtagatctctgcagcaattatttcctaaagggtaattatatttattttgccagattttaaagttcatgttattagtcaagtttgttgaattcatatcctttccaagtactgattatggacacagttatttcaagatcctgctcaaattcaacccttttatggaaaatcacatttgtatagtctatgtagtctaacatactgaatttacttcttccaatgcctgtagaaaagcatgttccccacattagcatagcctcttccatataacacttactatggaatatttcaaacatatgaacaataggagggtatatgaaactataatgcagcttcaaactgttttgacacatgagtgtaacttctgtctctcttgctgtactgtccttacctctctcacattgagaatcccagttaaccacgatggaaagactgtctaggatattcctctatgtttctttttgctcagttaccaaagcacacaggaaacagtctcaaaaaccaacgcccaatatggtcaccaacaacacagtcacggaatgttaaatagttgctccatttttcccttcagatacatgggcatccaagtatttgaatgttcgatttgatttgttttggtttacttaaaagtttcaggcattactttttaaagttaattttgctgatgattgtataaaagtaagtcaaccctactaaataaaatactttaaagaaaactagcctataatcatgagcacttcaatgtacaatattcatttatttatagtattcctttttagcttcttagtctattatggtgatttttattgtttttgtttctgatacatactgtctgattgggtggggtccacaaatacatggttagtgattttatctaggattgggtacctccaacttgtgacggttacatagctgaattaactagtgactgtggatgggttgtttccagtttttgactgattgtccaagctctgtaaatgcattcatctttttcatgtatatacacatgtagggttcactatgaactattgttcatagttcacaatatgaactattccatgcagtatagaaatactttacagtcttccctaccattgtattgtgagtttcttatgaagttcttatttatttgtccatattttcttgaacccagaacagagtgtcacccataataggagttcaagaaacacaatttgctaagtgaaagaaaaacacacagagagagacatcataatgacaaaagtctgttaaaacatgactttgcataaacagctgaattactgagaatgcaatcttaaaaaaaaaaaaaacctatatgaggtggggaggaagaaggagggggtggagagaatctctgaaaagcagaacagaggcctggacaaggataaccccaagcaacagatcacagcttcatacagagtaaatgggaacctcccttgaaaatagtgggacttgtggctggagagatggctcagaggttaagatcactgtctgctcctccagaggacccagattggagtcgcaacacccatagggtagcagtgcacaaccatccgtaactccagtttcaggggatctgatcttatcttctggccttcatgggtaccaggcatgcaagtgatgcaagacatacatgcaggaaaaatatccatatacacaaaaaatatcaactttaaaaaaactgtgaggttcagctctaataaaaagtcaccagacatgtatcagaatgtctgaccaaacaaaaataagaacaataaaaacatgaagtgctggagaggatgcagagaaattgattcctcatctattactggcatataaaatgcagcaaccattctataagacactttcaaagtttctcataaaactgaacatgtaactaccatagagatcagcaaacagaagcagaccagaggccatctggaaccacagcattacaaaaaatagacacagctccaaataaatatatggttaagtcagtttacaaaaggtctctgttaaatagatgtatgttccagtttggaagtgcctatgtagaaaactaatggataaatgaagtttctctcatatgttgctaaaccaaggagatgttctgtatagttttctagccttagattaatatttatgatggaattacaagataaaatcttttaaaagacgtattaagttcttagcatggagacagctctaaacactaccctggcaaaggttcgtctttgttcaaaaccttcatgtaactgagcatggttttcaaaaccggtgcctgagggcaagggtttccgctccatgatggagcagatgcttaggatggatgaaacccttggatttcatcccgagcactgaaaccaaccaaggagccaaactaacaacaacaaaagtaatgtcagagtttgtttcttaggtttttctgggatttcaaaattttaaagaatctctttggttgtctcaagaaacaccaaccacagaagttgatttcatcttacttaatacctgtccagtgctgaattgactgggagatccacaagtttttcttagaatagtgtttttcatggctataattccatcagaaaatgtgtcttagtttctaacggttatatcgtcatcaggtcccctggtggagagatgggagcagtgcaaacttgtcatccattccttaccttgtatcttatggggtgcctattggggtagcaaactttgtcccaagtcttagaaaaagacttggataaagtgaaccaggccacatggcaatgaatctcttagtgttcacacctgaggtcggatgttgccaggaagatctggctaagaataagatgccagagaggcacagaacaaagaggacaaacacagtgtgtcatactcccacctcacagtacagctgctgggaaagggtcaccggctccggctcttagaaaacattcaggagaaagaagtggggaagaaaggagtgcattttgggcagagggcgcacaattgctttcaacaaactacaaataccagaagggcggtggtggcgcacgcctttaatcccagcactcgggaagcagaggcaggtggatctctgtgagttcgagaccagcctggtctacaagagctagttccaggacaggctccaaagccacagagaaaccctgtcgtgaaaaaccaaaaaaaaaaaaaaaaaaaaaaaaaaaaaaaacaaacttcagatcaagtgaaatcagtaaatccctagcttttaaaggccaaactggcaatttcacttgctacacactaccagtttcttgtggctgcagaagtgagtgctgagatgaaacagcagaaggtgaggtgtgagctgggcaggacttgatgtgggagaggctctcctgcactgtttgagccaaataattcagacctgtgaattacagcatgtttaacagaatataactgctttctagttaggggccaatatctgtgtcagctgtgacaacagcggcaaaatgaccaaaacactttgtcaggtgactccctggggtgtggaagtaaattggtccagtttagaaatactgcaataaaggatttgaaccccggaaaagcctagaagcaagtccttaagaatgttggatttgttccaatagaaaacgtattattttctgagaccagtcaggcatgtggaaccatgtggagctctcatgagaatcagacaggtggggggtggacgtacaaacattaagaaggaaggatggtgtgtttgaaaacttagttataagagtttggcagggagagtggaggggtgaataaaaggaatgactccattgcaatttcactttcagagtcagggggagggggaggaggggaaggagggggaggagggggagagtcagcacagagttgtgtcataggcagcagcatgagacaggtacctgtagggagcgaatggccacctttgggagtgtctctgaccaatgagcaccgcagtcttttcattctctccctgcacatcatcttacagaaaacaactataaacatttagatcttcatattgattaagagtgaaaatgactgactttccgggtacctcagatgtgccttgctctttcctgctccaagtcgtctcagagtctaattcttctgcctgtaaatacttccagccactcttcatctgccccttcttgggggtctgaaaaaccacttcatcagagaaaccttccatgacctcgatctacagttgtagtttagatgtgcacttaccattctttctcagcaggcgtttgagcaggtgtatgcatgtgcgtgtgtgtgcgtgtgtgtgcatgtgtgtggtgcctgcctccaatgatggtttctccgttatgcctcttttagtcggtaagctccgtaggaacaaggaggtgtttacactgcccaactgctggttctacagcagctggcagagtgcctgtcttatggagatggtcaccagggctgggaaatgtagcttagtggtagagcacttgcctaaatgtgcaaaatcttgggttccattccaaccactgcaaaataataaaactttaatgatcgtatcataatgtgggtggtcaactaatagttttgaccaactgtcccaattttgaaaatttttctgatgctttgtgaggttggggacaggaacagattctctctctctctctctctctctctctctctctctctctctctctctctctctctgtgtgtgtgtgtgtgtgtgtgtgtgtgtgtaacacagaactgaatttgcaggaaactgagttcatccatttcacacccccactaaatggaactgaggagaaggagaaaagagaataaaggtccacgcagaattttgtgttctcagggcttccctgtgggcatacggggcccatcccactcaggaaggcagagaatgcctacccaggggctaatggggtgaaacccaaaaactgtctccttgggcatccatagcccacattattttggcacgcactggtttgctcaagtgacaggattacatgctgtgtttcaaaagcatgatacagagggaagggaattttggaacacataggcctggccacagccacagccattggcagagaccgatggtctctgggatgggactgagagatatacagtaaattaacttggatagtctctgatcgatggtctctgaacctgggagctcaactgctaaatcatgacaaaggcactgctgtgcttccccagggaggagagccagcacctttcagaaagaaagcctgtgcccacacggtctctgtgtgggtaaaatgacaggagggttctagaagatactgctatggaaatgacatgaaaatgcagactttacattgtattgtattcctattcccttattcaccactgcgactattactgtagcaaggtgcccagacctgctgccatagttattagactctaaaggcctcctctacttccaatccttgtgtgacatgattggctcacacagaaattgcactcactctattcccagctcctcccatatccacagtgagctgtgatgctatttttcatttttaatggagacttcctcttgagtgctttcacattataggaaaaaatgggcttgtatattaaacaacaaaatgttttgatttataggaggaattatctgatatgcaggcatagtaaacaaaatctatctttcatagatacattaaatccatattttataaaatagtaccaatagtgtatttgtgtgtgtattcatgtacagatacataataatttaatactataaagcttccaatacataagtaaatgttatgtaaagtcggcagccatatactttaattattcctattttaaatgatttccttttgtgttatatggagacacttcgacatcaattatcatttcctttataactctacagtctgtctttttataatgtgcaagaaatcttaagtaaaaatagctctttggaaaacttgattattgccacaaaggtcaatgtggtgaagatttgtgcataaatgtgtcatatttgtaatgttctatttttattatgagagctgtaaaactatgaataatcttatttattccatttattctctagtttatataaaattatatcctacagttatcctgtcacaaacataattggccagcctggtgcctgaaatgcattccattttatcttctcagcatgaataggcttgaaacctcctggtcatttttttatgcagccctgatggttgggagaatactgcttgtagaacaaaagctgaagcccacgaaggacaacaatgtatgcagaaaacaaatagattctttctccttgaccttggaacacgattccagtttcatagatatatttattccacaattgttgacccctcccttttgccagcagctgccctagggaatggggatgcaaaagtgagcacaggcagggttcttgcccttctgggactctgagatcaggaaagcggagtgcatgagaaaatgctagcattcaaaccagtagagccatgctagaacaaaacagattcagagtagagagcatagaggtgtccttgaatcgttctgtcaaaggtggcttccccaagcaagtgagcagagattggtgtaacggcatccaagcatctgaaagaacacagcatatagagatcctagagaaggactgcccagaagtgtcacacccacgtgactaggcaaccctggggtgagaaacatggtaagatgtgggaatggagagtcaacaaggaaaagatcatcatggctccacaggccacaggaaggaatctgtgtttgtatctcaagagggataagaggtggagaagagagttagaaagccatctatctggatacttagaccgctttagctagggtgtagacatagagtgtggggttcccaatgggcacaaaagatcactgaagagctccagctttgactacagtttagaattatggctggtgtggacagaaatgtaatcagtacagacagaacataatcaagggtcatccctaagtttggtacttatgctacaggattagttaccttcattcagtgtgtgtgtgtgtgtgtgtgtgtgtgtgtgtgtgtgtgtgtgtgtgtgtgtgtgtgtggtttctatccactccagcattttctcctgtgccatactccatctaggcttatgcctccttcgaatctatctttctccccactatgtgccaaaaagaccaatataaatggagcttgactgacccaaagttcccagggagctggaaaagcagcctgatgctggagaaagattccaagacgtggaatcagagtaccttgactcaaggtctatcttgggccattctcactttccacttcgaattctttatctgaaaaattatggggatagtagttaacatggcttgacatgagacttctgtgtatgctgtaatcgtggttgcttaacattgacataagactgtgtaaaatgtagtcttgtgttgcttaacaatgattgacacgagactcctctgtatgctgtaggcatgtgttactaaacaatgggatagattctgagagatgcaccattaggtgatttcattgttatgaaaacaccatagattgtgtatagattgtgcttacacagacctgtgatatggatctgtctctcagtgtgaccacttggtgtaattgagtgattcattacacataagatttatgaggatactgactgctgaacacggcatactatttaacatttaggaaaataggtagaagagatatttaacatagaaatatttaacataaaaacccaggagtccatgggtttttatgcctgcaacaacaacaaaacattaagtaaggaagaagtagagtgcactatgacacagtagttagactgctatagtaaggaaagaaccagaatctacttatcattttccaacatcatttactaaggataattttatatgtacattacagcagccctgtatacaccagccttatggccttacagtatcacaatggctatatcaataggtgatatgaatttttacttccactaggtttctttttgaaacagagtctcactatgcatcctagcctggcctggaatttacaatcattctgcctctgcctcccaaatgctgggattatatgcttgagtcactctgaccagaatttctttagttatgggacgactgtcatatatgagatctcttattggctaaaatcctgttacatggtgccagaccatggacaagcagattggtatacaatatgtgcttgctgcttttaaataaagttttaatcttatcttgtatgtatctatcagggattacaaatttatttcttcctgtagctaaagtctttgggaaagcttgcttttcatcacaagtggcttcaatggagtatcttcatttttttattattataccagaattgcttggcattcagtacatagcgagaaaaactttatcatgaactggcattttttttcctctgcttagccatctttgcctcccttacaaagcccagagataacagattaaactcgtcactaagaatccttttggttttatgattaaatcacatttccgagaccaagtaggtctttattctccaggagcactccagtaactggactgctaggaatgaatgaatatgctcagctaattttttatatactgcattttcttagctgttgctagctggttctattttatttatttattttggtctgggatacatttaatttggaatcattcccaagacatgtaaaagtgagtgccaacagctttttcaagcacaaattggatttaataatgtttatgttgaatgcaggcaatttagttatttcttttaacataaagctcttctactcttgccgagcaaacctccatgagactgacacttattatagcttttctcaattgattaatatttattgagcctggagtatgcatagaacccagcacagagtatgggaagaatgcaaaaacttgcacaaagtcctggtctctggcatgcaaattaattattgagagaaagctgagcagcaacctctgtgagaaaaatatcccagaggaacctaagactggaaggagcccgcgatgttcccacatcacctcttgctcatcacactggatcccttgtacagattcttttcccatttccttcctcttgatccctgccaatgtgggggatgatcaagtccctgagatttttgttcgaatttgagaaagctttgatccttaaagttttgtcacagcttggtatacagatctctgtgacctctacttgacctttccatgccctgctgtgtctatgaaaatttgaaggttcaccaaagtttctcgtttattagtgcttgtataatgttgaacgtttgtaaagggctgtgcatgctttctccttacggtggctatgaggcatgtggtagcttaaagcagaatgcaatggagtcacaactagattgataacagatggtttcgtaggaaagtactcaggttagggagccagcgaccgggtttacaccggatgcctgctagtccattcagcctggcaggagagggaaaagagggccacatagtgcacctctgatatttaaagccttgctacatcactctgaccatgcccaagtgggcatggtctgcacttccccctacagtagctttctgttattgtcacaagcatgtgatgcagtcagtttataaagaagaaaggtgtgggttctggagagatgactcagaggttatgagcaccaactgctcttcctgagttcaagcccagcaaccacatggtggctcacagccatctataatgagatctggtgccttcttctggcctgcgtggatacatggaggcagaacactgtatacataatgaataaatacataaaatctttttttttaaagaagaaaggtgtatttggactcacggttttggaggtttcaggttcttgtgtttgggactgtggcaaggcagcatgccatagtaggaattcatgattacgtccttcacctcatttccaggacagaggcagagaggctgagtcccacaatcctatttgaggcttcacttcctaaatgatccaccacctctctgtagtgccaaggcctggggtccaggcctttaacataggaggtttttatgaatacttatctaaaccacagcaagggaaaattactattttccccatttaccaatgagggcactatatcttggagttgaacagctcagttaagttacccagatagatagcaaacatttaaatcttgaagttctaactcccaaatctatatatgttccacctaaccatggcctgtgattacaagaggcactacaaaacccttgatgatggatagccacactctgtggggaaagacacctgcaatgctccaggtggattggaaggtatcatggatgaaaagaaacacagctctcccacatccctgccctgctgtggcccaagtggtcacgggggagatgatttcaatggactgtagtatttttaaaagagagggattgcttgagtagtgagaacttcctgtagacaaacacagtccttaaaaatgcagtatatttcatccatagttaagtctgtagaggactcataattttcctctttagcctacatgtaactacctatatttctgtgtgtgtgtgtgtgtgtgtgtgtgtgtgtgtgtgtgtgtgtgtgtgtgtgtgtgtgtgtatgcgcgtgcttcgtacatgctcacactgtaacgatggatccttcagctacctgtggtgtaaatatatgagaggtttcctgctgtcctgtgcctttatttagactttctttggtatcaattcatccttatttcccaagagtctctatttggttcttataattaatagggagctttaatctgtaaaataaatcttcaagtgttttcaggaaaggtactggagtttcctgtgcctataattggggctttttttcttgactgttttgctcctagctttgtcagccattgccccgcttctagaatggcatgagtggcaaatcagatgcattttctacctcaaaaatattttctaagtaaatatttgtacatgttttagtacaactctgggttgcacaaggaattcccagagaaggtgataatcgagaaatcttaagtggcctagataatgagcacattattgcagaaagacatgtcttccaagcgttgtttctacctaagcacagaatctgtgttctcttgttcctgctgaaatggacacagatcatggtggtttgcatgcatgggcttgtggtgattcctgaccacagggtcacagattcttattccatttcgggtatgttttatactttctatttcacgtttcatttctttttttgttaatttgtttttcaatagtttcatagatgtatgtaacttgactatgttcaccgctattgccttctcttgtctcccttccattcctactgaaccttttcttcccaattaagcttctgtttctcgtgtgttggggggagggcactgagcctaactagggttgcttgcatgagcatgggcagaggttacctactagaactcaagaaacttaatagtggctacattgctgaagaaaactgccttgctttcctccagaaaccattagctgccaatatcacctcaagagaaggttgtgatggctcatggtctactctcccatccatggtaagatatttgtgagcccaatcttgtgcagttaacaatgaatgctgtgagttcatgagcacaatgcccatgccttatgcagaagatgttccgtatcactctttccatttttcaggctcttccattctttctgccccctcttctgtggcattccctgagtcacagaatgggtaaaataggactatgcactcatatcttattcttagttctttgggcagctatgagtttcggcagtgattgccatctacagcaaaacaatgcttctctacccaaagcatgttttgttttgttttttaattgtgactgacactaggattgtagtaattgaatcatgcagagtggtaatttattaattctaatagaagagttgctgagacttttcctagataataatgtgttatctataaacaatgacaatttgacttttccaatttggatatcatttaattactgctgatttatttgtttgtttattcctttgtctgcttgctctgtttaggactttcagtattgtgttgtgctacagttttgaaagtaggcatcttccagattttcttcattcaataaaaagtttgcttcttctttcttataagtaggctttattgtatgagaaaaatcaaacctgttatctttgtagcttgctaaaggaacattctaaaagaatgggaaatgatgttattggcagaataaggaaagtgagaagtgagagctgccccagccatgtggaggtcatgggaaacctgttgctgacagttcatccatgaagtaatgagacccagagacagtggttgcagatattgtgaaataattattatgaaagtcttagcatgatacaaagaggagggtagtagaattggaccacatttcttttgtaaccaggtctccttagaggcatttctgctattgacaacccaatgcacagctcttctattttcactagaaattgtactgtatattttgctaaaatatctttaaaaaagaaaacaacatggctgtaaaatgaaatttaaaagaataaataattgaaaaaagaaaacttgatttgccagtcatagttgctttgcaaatcaagttgtttagtcttctttcactaggtagtaaggccaatatctctttgtggtctgttcctctgagtcatcatcactttttatcaccctcaagtcccaggattgtccttctcccttccccaacattctagtcatctccaatatttagtacatattgtaagcctaggctgctattgtttctgctgactcctggatataccacctacttcttgctcccaaattctctaatgagtcttcagaaaaatggaaagtaacttccatgtggcaagttcaatgcatgctttagcatattcatgcaagcagaaataggtctttattcaacagaaaaaaaagtaggcagaaagtagatttcatgtagggaaggtgacaagaacaagattgtagtggagggtactgtgtcaagtaaaatttgccaaacacaggaagacagacactgtatgatctcacttgtaagtaggatatacagatactgattttaaaagcttagagaagagtggttaccagatatgtagaaagagggtgggtagctcagaggctgaaagcattagctgtttttccaaggatttttagttcaattcccagcaaccacagggtgcctcacaaccatctatacagtcttactttcctgcacaatagaactattgaaataatgatcacctcttaaaaaactgtaaaaacaaaaccaatatacactccaagtggagccccagcctctgatgatcatggaagctgtaactttgctgtcattttagacacaaccatgtttacctggtcattttccaaggtcttatttcctgacacaaccatgtctctccctggtcattttccaaggtcttcttttcctgttctctgctaggattttttcagctcccaattcttagattcagtcttttattataataccaaacaaaggaatatgcttttatacattctatgaagcaaactccataaaacacctggtatttgataccatggtcgaatgaccctgatgggattgtttatcccaatcactaaagggatgaaaataatagagatggtgaacgcactgctgaaggagaaaaataacagaacacaaatgttgacaatgtaatagcaaaaatacaaaatcttttcatttcagtatgcaatccactgtaaaagtctgtacccaatcagacccaggagaatatgtctagcttagtgtgcaggaagactgtgctcaccttaatgagagatgatccattcttcatgcaaaaggcctctatttctgactccagaagaagcatcacttggtgaagactttttccccagatgaccaggagatgacctttatcattgatcagtacctttgctgatctgtatggtatgtccagcatggagtgccagaatggttgcatactctaaccacaggatgacagcatgcaagtgtatctctcagtataaggaaatatgtcccccagatgtgattatattgcctctttggctcataaaagagaaaggttgatatgtccaggtttagtgggttgtatataaatctacacgcttgcctgctccttggagctattaaaggatatatattttatgatcctattgtttattaatctcccagtgaaattttactctgcccattgtagaaagatattggtatgtatgcctatttttcatgctagttaagcttttttataacattttatattggacaaggaagcataggaaatctaagcagtctgtctctttcttggtctgttggtttagatatactaccaaagatcttaaactttcccttaaacaatacttgagatattttttttcctagactagtgacatttccctcaccctataggaattctattaggtatagttttagacaccatatataaccatagtagtatcataaagactttctaaacaggactctttgtaagagatatttcttttattttggtggctcaacttatgcaaattattgtagataactgaaaactgagaataagacaggtattaaattacaaatcctttcttttattaattatctagaatttagcacgtataccaggtaactgttttttaacatttgttaataattatgtttttatactttaaaaaaatggagcccggtgaaggactggtgctccagtgaacagcacatggaagccctcacctcgtggtttccataagagaagacaatgtaacttcatggtgcattttcttcaaaatcagaaccagggacaccatccatttcttagtctgcatgtgcaatgggttggaatattgtagaaggactctggagtccctgagaagattgaacagataatgtgaaatgcaaacacaagttggactggttgcaaactgaaaagctcttggatgtagtagctcaggaaataggcatcctttgggtaaactgggatttgcagtcaattcaatagcaacgcccataattttgtcaaacatccatccctgtggctgcactgactcctcttgtcatagtggatgccgagctctggggattttgtcatccaggaagagccagacattgtctttgaacaaacaagcatacaatagcagtacagtgaaggcactccagcaaaatacactgggtctttccactcagtagcccctgacagggagaactgtgctggaaaatgacacaaaagcattttgtgtcatgtttaggattgtgtaaagtgtgagtgtagcttcctcttcatattaaatttcatagtttttctaatcttggaagactgttctgagattccccaaaatgttagaactgaagacaaaagaatgagcagatactatgtttatgaaaattaagagacagcttccacagaaacagaaaaccaagcttatgcagaaactttcagagctgtagaggaaaagaaaattaaacaaaaggaaaagcttaaagtagaaggcccagagaggaaaataggtggtaggagaggtaagtataaaactaagaaaagactatacaggaaaatcttaaaagttaaaaaagaaattgattgtggaaatttttgagaagcattctctgctgagtgtcaaacaaaaactcaaagcaagcaggagtctgaaatgagaaacactgattccattttagcagctgcgtcttgggagaaaggggagtggagcgaggtgctagacccatgtttggtagacagctgatgtttgtttctggtgcaagtcaaaacctccatggagaagctaattctgtcctgagagctatcgcttccaacccaaaagaagtgattgtacacctgcaaatagtttgtgaaaacatagcagtccttaaagaaatttgagacacggagcccatctttgacaaaacatagaaataacctcttattttcttggggatgctttatacttattttaaggagctttgaaatgtgtaagtgtgtatgtgtgttgggggaaggattgcgaaggtgagtgtgggtgcctgcaaaggccagatcctctgaagctggaatcatgggtggcagtgagcctcgcaatgtgggcccagggaacccaactcccagtcttctgaaagaccagagagagttcttaatggccaagccatttctccagccccttagatttactttgaaaggcacattaataaatctttcatggactattttgtctgttcaataagtttcttttcaattctccataatgctagaaaaatacctttcattgtattcactcttcaatgtcctgtaggcatccttacacctatgtagttgtgtgtgtgtgtgtgtgtgtgtgtgtgtgtgtgtgtgtgtgtgtgtgtgtgatacatgtgttcacatgggtgtatgtgcatgtgcatgcaggtgcaggtgcgtgttaagaccagaggtcaatacctgtgtcttcttctatcactttctaattttgagacaaggtctgttactgagctgacgtcaaatgtgcaagctacttgcaagtggttctaagaaaacctaagctcaaatgaatcactctagctaggcacgctgaggacctgctgtctgtagggtgacaagaacttgtagtctgagcacccatgcttactgaacctggggtctgctgcttggggctctaccaaagaaacagcacacaatatttagcaaaatgaaatgggtttatttacagtttgggctacaactggaaagaatatttgtcagctttcctcagtctttcccatagcagtgttatatgtgaaacaaaagtcagagaagatgctcgagtggatttggctgtgagttaagttttgggattcagtttctctgacagcttcttcctcctctagtggctctactcctggtgccagggcttgaggctattctcatgctgagcatgggatttccttgagaaattttgattctttagggtcctggactcatagttacaacccctcttctttcttgtcccttcctcgatcttgagagatttgaaatgatatgaaaattctggaaatatgactgtgctgaaataccatgagcagaggactgtagaagtacagtctgaaaataacaactagtaccaggtaaccatgcttaagacttcttctaaatgacctctcagcttcatttttggaagagctgacataaagtaactccattttttgtgtatgctgtttgctaagatgaggccttgctgttaacacatggtcctctggctttgccatcaggtctgtcataaatccattttggttgaacaacttctcctcctcaattctttcctgacaatatcgctgataaccagcctgtggtttggttttaactgtccttcttgctgagatgaaagactatctgttccagttagtcttacctgacacttgtagttgggagttaatgccaaaagaccctttgggccaaattcaagcatccaagaggtcaaaggagggactttggctgagtttacccagaagccagtttcacactgaattttgtcccttctcttttgctatcagttgttcttgcagaacgctaaaatgcaactttacaagaaaattacgaaggcaagtcaaggaaggtttagtcatttatgaaacagtctattgtcaggattctctaggtagcattggttgatccttttaatttttagaatggtgctgttggcatttaaggtgcttgggcacatataattatttgtgctttatacaatgattgcaatataattaggatgacaccagcttagtgggtgcttgtctagctttgtattcaagaagatttctatagtggaggaacaccaattttcaaccacacacagatatagttaactttcacttttgaagtataattgaaaatatttacagctttagaactatacaaacttagtgaacagtagttattatcaaaagtaaactattatcttatatacaagtacatctcatatatacaacagcacagttatttagagaaacagatgcacagaaacttctcagtagcaggactgcccaactagtaagatccctctatcagaatagttccaaatgcaaacagcagaaatgccaagagctttcttgcatttgacatatttaaagtctagtctagatgcaatatgtgttatataaaagacagttcttattggctactttatgtgtattaaatctgtgtgcccttaatagtacagatttttcatagcatttacataaagcttagacacaccacatttgaagctctccaatgcatatacatttagcattacagacattcatgggacaccaactataatatcctaaagtatgtttacttaaccagtattaaaaagcaatcataaaagactttaaaacagactcccacatttaatgatttagtacatggtttcatttagcaatgaaaaccactatatagcagaaaacaaaagaaatgatcttgatacacactaaatatcttttctctccatgttttatttaaattagaaacaagattattttacatgtcaatcccagttccctctgcctcctcctcccctgtcccccaccgactaacactctacctatcccttacccgttctgctccccagggaaggtgaggccttccataggtggggtcttcagagtctgtcatatcctttgggatagggcctaggaccacccccgtgtgtctaggcccagggagtatccctctatgtggaatgggctcccaaagtccattcttatgctagggttaagtactgatctactttgaaaggctccatagatttccgaggtctcctcactgacacccacgttcatggggtctggatcagtcccatgctgattttccagctatcagtctgggaaccaagagttcccacttgttcaggtcagctgtttctgtggggttcaccagcctggtctggacccctttgctcatcactcctccctctctgcaactagattcctggtcagtttagtgtttagctgtgagtgtctgcttctacttccatcagctgctggatgaaggctctaggatggcatataagttagtcatcaatctcattatcaggggagggcatttaaggtagcctcttctctgttgcttagattgttagttgatgccattgttgtagatctccagacattttcctagtgccagatttctctgtaaacctataatggctccatttattatggcatttcttatcttgctctcctctattcttaccccaactcaaacttcctgctccctcatgtccatctcaccccttctcttctttccttctcattctcctagctccctcttccctcccctcatgctcccaatttgctcaggagatcttgtccctttccccttctccagggaccatgtatgtctctcttaaggtcctccttgttgcctagcttctctggcggtgtggattgtaggatggtaatcctttactctacatctaaaatctatatatgagtgagtacataccctgtttgtcattttgtgactgggttacctcactcaggtttcttctagttccatccatttgccttcaaatttcaagattccattgtttcccccaccccacccctgctgagtagtactccattgtgtaaatgtaccacattttctccatccattcttcagttgaggggcatctaggctgcttccagtttctggctattacaaataatgctgctatgaacatcattgaacagatgtccttgttgtatgaatgtgcttcttttaggtatatgcctaagagtggaattgctggatcttgtggtagactcattcccattttcctgatgaatcaccatactgatttccaaagtggctgtatgagtttgcactcccaccagcagtggaggagtgttcccctttctccacatcctctccaggacaaaccgtcattgggatacacacaaaatattagtgtgtgctctttaaacccatttttgtaggcgttgctaatggcagatcagcattttcagaaagccctcttgcttttttccccttaattctattcatcatgtttttatttattttacataccaaccacagtttctcccccctcctctcctccagctccttccctgcacctcctctccaccctcccccatccactcctcctatgtcttcattcagatgaggtaaggcctcccataggtatcaacaaagcataagccctcctggtttaaacacactcaggttctagctctccatgggtgcattaaaatctggaccttgggagctgcttcgaataaccttgatgtttaactggtcagtcacacaccaatacatttttgtttcatcttccatagactttttgtgacatactttaaccatctgcttttgcccttatcaatttacatgttggaataacagttctggagcaaaaatcttatatgactacatagcattcaaaaggatttttctctttaactatttttcatctattttttgacaactataaattttcatagctttctcccactccaggggttgtttatgccttgagctttgccacaaaatttcataactgagcatctgtagttctctgaccccagaatctaagaactgtctgtccagaaagcaagagaggcaaagccaggaaagcatcttctattgtgtacacttaaaaattttgttttcttcttaacaaaatgatggttttcattttaatgatttctcagcaagttgtatttgaagtatagacaacgaggactctatgttttaaagacctagtgcttatacatacaaatacaggcaagacatgctaacattcctggaacttttctgttttctcttgccaacatatacaacatttctttaacaactgtttaagtcctgtgtactaagtggagtttggtataatttaacagttttaatttataggaacactcatttacctataaactaacttgatgccatgggaacactatacaaatataacctgtgtgcatttagacatttaatgtacacatacacagctgtacatgaaaacacacaaatgtattttacagttcagagtcatcatttgactgttgtttagacttctgtcctgattatttcctccacagcactgagcaacccttaaagacaatagacacagaacaaaacctaaatgtcataaagaaaggcctaagaggccagtgaaagcagagaattccaaaagtgaggctttcgtgtagatctagtacccttgttttaagagttaacaggcagatatggtggtatacacctctaaacccagcacttgagaggtggagacaggagggttacaagtccaaggtcctcattgctacataaggattttttttcatttgttggtatgtggcatgtacacacctgtgtttgcatgtacttgggcctgtgcataagagcagaggctaaggggcaggtctactatcctgctctatcatatcacaccctaatccctaaagacaggctctcactgaactagactggcagccaggaagcccccaggaatcctctctccagccccgaccctgcactggggttgcaggcatgttcgctgtcatactgaactttctgtatgggtgctggacattcaaattcagtagtctgtgcttcctggacacaggcttctcaccgctcaggccacttctactcctacatagggattctgaggccagtgtgagctacatgagaccttatctcaaaaccaaaaccaaacaagcagagatatacaggcatgggagatacccttacaaatggaaacttcccttagaagctttaacaaggaaggtagcagaagcagctgtggtgacaaccaatgcccacttgacctgaggacacctcccttcggcttcctcttccctgaactgtccgtccaggatgcaagaaagcgaacaatagagcatctcctgttacatccagtacacacacataaaagtccagtgtgaacacagggaatctagcattgctttttataggtaatactgactccatccgaataaccttacaagaatttgtaattaacatattgtatatgaccaattaggtactaaaatacttaaccaaacacaggccatgtatggtggcacatgcctttaattccagggaggcaaaggcaggtggatctctgtgagtttgggaccagcctggtatacatagtaagttccagaacagccagggctaagcagaaagactctgtctcaaaataaaacaactaaacaaaaactttagccaaacaccattgcatataatcaaacatatgatacagccatcagcaatgaactaatgtttgaattaccttaacattgagtagtaacttaataacaatggtagaaatggccactgttacttaacatttatagaaatatgtgtattttctgcactctcacatgtagccgagaagctatgcaaaactgtctttgcatatatacccagtctcccaagttttattctcttagttcacaagtctacattttaaatgtgcctagtgtgaagtcatctcgaaacttctgagatttggcaaagtcacattttacaatttgcccctcagatgcaaaacatctgtcatctccctgcttggcagtacttaatagtatattctgagcaatagtaaaaaaaactttccaaccccaagtgctattgttctgagagtctgggcatcttccagaatctcatcatgaacaggatggttcgtgacattcaaatttagccaacatcttgactgaaggtataccaatagtaaactgatagttttaatatccattctagaagcattgtatttgttgtttcattggagaaaactcgtttatttctgagagtattataaaacgttaaaatagtatgcagtagagcacatgttaatgaagcttcaagataatatagaattcatcatggtcttggccatctttgcctcatcataaaactatgatttcattgtaactacaatctcatcgtagctaccatatagagaatgacatcaattggattctaacttgaaagtgcattgttagtaataggaagttttgcatttcattagatgcattatcttttgattggtgtgtgtgtgtgtgtgtgtgtgtgcaattaaagaaaaagaagccatgaacttgaaagagaacaagggtgtggatacatggaagtttggagtggcaaaagagaaaatgagatcattatattttaaactaaaaaatttttaaaactactttttaaaaaagtatgctggataattttgttaacatccattaatgtattggcacaggcttactcttgtagtttgtggaaactgatagaacgttgggactgtgaaagtaataaaagcagtggtgaggggcctaagcagcagaagggaagtatcagtctttgaacatcgtcttttgcataaacacatagacagcggtagaaaatgggcgaggacctccatcttctccaaacagaactgttgaaatgtcaggaaaagaaatagcagcacaaacattttgaaacattagctctgcttctctgtttgatctcagacactgtggaaacgctttgtaacaagaggaggaaacaaaggcgaagtgagcagagctttgctgcagccctgctgtgattgcctaactcaagtatccttttcccagaagcccttgtgctggggcttcaagagaagagtctgatggcgtcatgtttcttgggacacatttccccttatcttcacacctcatatcttagcagtgctggctgtgtctccaccttgtaaagagtatatatacacagtttattcatgtaacccttgggtgaatgagcagagattgattgaaagggagcccaaaccaggtagatgtagagaagagtctgtgaaggtgaaggctggcctcaagtgtctaaggtgccgtccagtgtggttcagcaccagaggtgagtgggttattgttgagaacacagtcgtcatgcacgtcctcagccctgagcacaggagtgaattgaatactgaacatagagtaccattgtctgtcatagtgtgtatatcggtgtaaatcagttgaccccaggtccctcatagttgccttagccaattcagtcatctgtcccctgggcaggaagagcaaggagcaaaatctaaatttagtaaatttgtgtctcatagactgtgaagagatggaaatgagatgacagggagctaaggtctcagaagggaactttgggctgcttcaaaggagacctgaggtgaaagaccagacctcaggttgctgagtttccctttgaactgcttttattgtgacgtagcatgcattcttacatgtctgtacagctcagtggcgtggaatgttacattgtcagccattatcacattttagcccattctatacccacaccatactccagccctggtcactgttctttgtctatatgaacttgactctattaagtgtctcatgtcaataaaattattcagcatttaccccttcatgtgggcagtagtcagtttagcaagatctgtctgttgtacgtgtcagaagctccttgttagggataaataatattcccttgactatacacaccacattctgtataactgttcacctgctgacttgaattgtttccacctttggcagttacaagctgctataaacttggcatacagatccatgatagagactctgttacctgttcttttgtctgtacattaggctttacttaggcacagttttcctttcctgcggctttagttacaaataatcaattgtggtctgaaaatattaaatggaagattctagaaataagtggtttgtaagtgtgatgagtgatcagaaggtcattagaatcttaacatcccttcataatgcctgtcttattgagctcaccaaattttatcaagacagtatcatatcatcaaaagatacaacagcatgcatagtacaagatacttggatattcccctttcatagtttttttatatgacattgttataattgttcagttattaactgctagcaatctcttacttgcctcatttataaataaaactttattacagaatgtacatataggaagagagtcggtatagtttcagtgtggtaccatctgtagatctgtagctttatgtatctactaggtctgggagcaaaaacattgtaaacaaagaaagaggatctggaaaagtgagaagagggaatgacaggtaaacagaatgtcacctcagagccaaatataaagggatagtgagtggtgtttgttggtactgtgtgagaaacatgaactccatgggagaacacaaggcaactggtaaagaccagagaggtagagaaagtatcactcttagaaaagaaagaacatgtaagccatgctttctctttgcctctctcttggtccagggtgggctaataatttattctgtggttcaggagtttgtaaggtatttgcgctgcttttgaagaagtgataaatatttatgccacactagggaggcatggaagaatgaagaacaaggctgtcaatagctaagccaaagattcataaacagcctgacagctgctcagaccggcgtgagtgacagccaccctcccagtagaaagtgatagctgtacgaagaccagtgaaggaagcttggtggctcaggttgtgctcagatttcctggcactctgtctggctccctgccatgtgccaatggattgccctgctgtgggtggaaacagctgagctgtgtgcaaagcttgtgatgggattctttccccccgagtctttgagcacggaggctgatgaattaatggtgaaggggcggatagtgttggcttccacaggagcagcaggctgtgtttcattcctatggtgaagtcaattatacaggattctctgcatctggcacagtagctgaactatttagccccccacctttcctcctagcttagtgacctcatcggtctatgctccacaaatgccattctttacctagtgcccaaggatgctccagttgggtgtctgcagacatcatgtggtgagagcaacaggactccgtgtcctgtggggaaagccctggtcagatggagttgtagatgggagcaaaagccggcaccatagaacgaagaggattatggggcagcacagagagatttgagaggggacagagcagtggttgatgtgggaacaggaagacaggaaagacacgagtcatgaaagagaatataatgattttatttttctagtttcaattccatcctagtttttttatattatcatcgttttgtgatagatttctttgtgatttttcactttctggatattaaagtaggaagaaacttttttgcatccaaaagactctaacatgagttaccccctaatgtagtagttgtgaacattgagctcactatttgttattgttgcttatttacctttgtctttccttgtggatgtgggtgtgtgtctgtgtggatacatatgcacacatgtgtggatgcccacagaaggcaggctagggcttcagttcacccgaggctggagttacaggtggttgggagctgaatgatgtgaagctgggatctgaactgcagcccttggcaagaacagcaaatgctcttaaccactgcatgattgctccagcacccgggcttcctttttaatttcattgaccatcatggtaaaatgagttagacatgactggtcactgaatacagctgtcacattgcaccacttagaaaagtgattctacagtctaccacaagatccagcaattccactcttaggcatatacccaaaagaagcacattcatacaacaaggacatctgttcaacgatgttcatagcagcactatttttaatagccagaacctggaagcagcctagatgcccctcaactgaagaatggatagagaaaatgtggtacatttacacaatgtagtactacaaaaaaaaagaaaaagaaaaaaaacaatggaatcttgaaatttgcaggcaaatggatggaactagaagaaaccattctgagtgaggtaacccaatcacagaaagacaaacatggtatatactcactcacatgcagattttagacacagagtaaagggttaccatcctacaatccacactgccagagaagctagtaaacaaggaggaccctaagagagacatacatggtcccctggagaaggggaaagggtcaagatctcctgagcaaattgggagcacgggaagaagggggagggagctaggagaatgagaagaggagaagaggaggggtgtaggggaagctgtagccacgccttcttaggggctggctacaagagtacctgagggcttgtgagggcgtggtcagagtgagtagggggactgcgttttcggtttcggtttctctttgcttcttgctgtacagactaccaccggctggctggttcgctctgtaagtaaggcttttccctattaaatacccttatatttctacctgactccgtactggtaatttcttactatagaggggtgaggaagacatgagcgagcagaaaggttgagtcggggcaagaattggagaaaacaagaatggagataccataataaagggagacatttagggttacagagaaatcaggcactagggaaatgtctggagatctacaaagatgacaccagttaacaatctaaacaacaaaggagaggctaccttaaatgccttcccctgataatgagattgatgactgatttatatgccacccgatagccctcatccagcagctggtggaagtagaagcagacacccacaactaatcactgaactgagctggaatccagatgcagagaaggatgagtgaagagcaaaggggtccagatcaggctggtgaaacccacagaaacagctgacctgaacattggggaactcttgctccccagactgatagctggaataccagcatgggactgatccagaccccaggaacatgggtttcagtgaggaaacctcagaaatctgcaggacctcctatagtagttcagtacttatccctagcataggtgtggactttgagagcccattccatatagagggatactccctgagtcaaagcacatggaggtgggcctaggccctatcccaaaggacatgatagactctgatgacaccctatggaaggcctcaccctcctgggagagcagaaaggatatgtgataggtagggttttagttggtggtgggttgtaggggaggaggggagagagagggaactttgattgacatgtaaaacaatcttttctaattcaaagaaaaaaaggaaagtgattctcttaaaagaattttgggggttgcattgatttattgtgtaatttcataaattaaatatcacatatcttggtatgagctatcaaaagtccatcaaccaacactggggtgaaaccattctttagaaagtattattgttttacaaatcattaaagtgttaaaatctatttaaggttgcatgagagttcataatagcttatatacagacaaggggtagtaatgaaaattatgaggacaccttcattaagttttatattacatcttagagaactgtactctacttcccataatacaattattttttaacttttctttattctttgcatctttcaccccatgactctgaaccccacccttccccccagaatgaaaaaaataaataaaatttaaggaggaaatggaaactacagtgtgacacagtaagtcatgcagtaaacccctttatccatacatttttatatccagatgttcatggtaaagtcattgttttggttctaggctcctggtctcagctacactgtagttactgggctctcactgggactcttcctggacatcccatcattgttgccctaagtcatggggttcctgcagcccttaggtctacatgactgaccacccctccccacatgttccagcagatcacaaatgggaaggatgttggggtgggccaaaacataaccctggttctggactggggtagtttctgggtttgtcaacctgccagctctcccctgtcttcaccaccagggtgagctctcctgctttgccctggctagttcatcccttgcagcaatgagcaagttgggggccagccagtcctcccacacctatgctttcagggccagttatactgtgttgctcaggttgagttacaggggccactctccagagtgctgataggagccgggacagctctgtgtctcctatgacctcagggacagctcttctacatgtcttgggcattaatgcggggagggggcattactccccccccaatgctgccacatgacagatgagcaatggggacagctctcccatgctcacaacttcaggactggctcacccacacctctgtcaataggttcagctctactgtgctgcccctgagaggtgcaggctctacttccccatctgtcgtaggccatgatgggcaagggataagggaaggaaggcttttatagcctgaaatattccttcttcctcccccttctgttcaaagcatcctattatagcattatttagtatataagtaatacagagtgtgcttttcttaagaaataaaaggagttctcaaaagagagaaggaggggtggggaggagagatctcaaggggaatgaagctaaggagaagccttttgagaagggacctgcccctgtgaaggcaggcctgtgaagttctttcctcatcatggtttacttttcttatggctgtgacaaaatgtctgacaaaagcaactcaaggtggggaagactttattttaacttacagttttcaggaatacattccatagagccacgtggaggaaggaaggagaagggaggcacagaagctagtcacaaggcatctgccctcagagagcagggagacggatgctcgcattcatgctttctcttttggacctttataatcaaccctgcaccccagcccatgagatggcgccacccatattcaggccaggccttccctcctcagttaaacctctctggaagcttctcacacagacacactctgatgtgtctcctaggcagttccaagtccagtcaggttgacagtgaaggtgacccattacaccctggcaatagaactttctagaaatcagcagtaagtagtagggtgggtgtttagcagtgtccaatcagaggatgctgtggtttctcagaagaggagtattaaaggtgaggtctctatggtggtacagtaccactttccctctcatcccctctttaaacttgacatgcactgtcctgaagatttctgtactgtgtgcatgtattttctttttgaaaacgtagaggaaactgaacactgggggacacctaagatgaagtttgctttttgatttctttgctgttacacccaaaacaactttgcttttaaattagcataaaggttatcaagttttctttttgtcaacagtgtttctttcctaccgattggatgaactattaatctctgatgccactggaaaacaaacctgtttgttagaaaaggaacctgaaaccactgtgatcagctaacttcagaataaggcccccatcaaagctgaaagaactctgccttagtttgatgtaataaaatgttcaaagctttttccagctggtcaaaggcggagtgtgggattcaggttgcccaaacagctatcactttatcaaaaaccagccagcaatttcttgtcattttctgttcacttttatctgtaatgaaggaggggtactgacacatgaaagtatagcatcttagctattgagtaatagctgtgttgccttgacaggcacagtgctcttattcatacactgatattcacaatcactccacctgctttgtgggtccagggagaatcctttgttgtgtatgtaggaattgcttgaattagagaggattcagctctttggtgaagtagatcacttatccttgcccaaccctggctcagtccttaagacattagaatgatgtgttcatctttacacacacacacacacacacacacacacagagagaggagagagagagagagagagagagagagagagagagagagagaggtgcaaaattcaattgtgagatccttatagtcagagtttcttaataatggagccatgactgtgaattagctgtgcatgtataaaatgcactcactccctttgtaaaacaaggaagaaaataaacactagggatacaaaggatacattttgctctttgcaacattctctatccatttataaacatatgtgtgttagatacttgataggtattttttaagtgaatgaagcacgtttttcttctcttttcccatgccaccaatggctgcaagctgaaacaatgacaaggcttctttactccacaggatcctccccaccggagagtatcagcaacacttgctgtacaggctgactgccatattggtcttttgtaaaagctagagtcctttgttacttggcaggggtgttgttaaattagttaaatacagaggcaggcagagaaacaactgggaaccaacatcttactcccagtggtttctttatcaagtaaaatatggggtggagggttgaacaagatgatctctagatgttccagttgttcaaaaggtctctgactctccagttgcccttataatctgtgaaaaatgggttagggtgcatcttccactttgaataaatgtagaggccatggctgattatgctcagcagtaaattaagatgggagtgtagctcagtggtagagcacttccttagtgcacaacaagccctgagttctatccccagtactgcaaagtcagttaatcaatcaaccagtcaataccaatcaatcaatcgaccaatcagtcaatcaaaaaagattgtgttgtggacacatagtttgtcctggggcaggtgtagtccagtggacagttagctcccctccttcttgctatgagagacaatttagattcagactatttagattccaaatagtggagaaaaatacaaagtaaaccttgtgcaccataaacagtatgtctcagtttccctcacaagcctctctcttccccatagatatatgctgaaaatgtctaatgtgattctttctccttttattcataagcacatatgcacatattagtggctaaacaaaccccatagaatcgctgcataaaatcttctgttctcaggtacattgccttcccaaattacttttttaacaaaaacactgctgtggacatccttatgattgtacccttgtgcacgtttgcaaccctttgtgaaataagtcttgaaatgggaatgtaagagtcaaggatatttgttgactgtgtcctttgccttacaaaagcttctcagtttcaggaggtcccatttattaattgtcaatctcagtgtctgtgttcaggaagcagtctcctgtaccaatttgttcgaaggtgccacctactttctcttctaagaggttcagtgtggctggatttatgttgaggtctttgatccatttgagcttaagttttgtgcatggcgatatatatggatctatcttcattcttgtacacgccagcatccagttatgccagcaccatttgttgaggatgctttctttttattgtataattttaccttctttgtcaaaaatcagatgtttgtaggtgtgtgggttaatatcagggttttcaactctattccattggtctacttatcaatttttgtgccagtaccaagctgttttcaggactatagctttataatagagcttgaagtcagggatggtgatgcctccggaagttcctttattgtacagggttgttttggctattctgggtcttttgtttttccatataaggttgagaattgttctttcaaggtctgtgaagaattgtattgggattttgatggggattgcattgaatctgtagattgcttttggcaagattgccatttttactatgttgatcctacctatccaagagcatgggcgatccttccattttctagtatcttctttaatttttttctttaaagacgcaaagttcttacaatagaggtctttcacttgtttggttagagttaccccaaggtattttatgttgtttgtggcaactataaagggtgatgtttctctgatttctttctcattgtgtttatcatctgtataaagtagggttactgatttttttgagttaatcttttatcctgccactttgctgaaggtgtttatcagctgtaggggttctctggtagagtttttcaggtcacttatataaactatcatatcatctgcaaatagtgaaagtatgactttcccacagactgggaaaagatcttcaccaaccccacatctgacagagggctgatttccaaaatatacaaagaactcaagaagctagtcaccaaaacgtgaaataaaccaattaaaaagtggggtacagaattaaatagagaattctcaatggaggaatctaaaatggctgaaagacatataagaaagtgctcaacatccttagccatcagggaaatgcaaatcaaaacaactgtgagataccatcttattcctgtcagaatggctaaaatcaaaaataccaatgacagcttatgctgtagagagtgtggagaaagggaaacaccctccactgctgatgggagtgccaactcatacagccactttggaaataagcatggagatcctcaggaaaatgggaatcagtctaccacaagatccagcaatttcactcttaggcatatacccaaaggatgcacattcatacaaccaggacatctgttcaactatgttcatagcagcattatttgtaatagccagaaactggaagcaacctagatgcccttcaactgaagaatggatagagaaaatgtggtacatttacacaatggagtgctactgaggggggcaatggaatcttgaaatttgaaggcaaatggatggaactagaagaaaccttcctgagtgaggtaacccagtcacaaaaagacaaacatggtatgtattcactcatatatagattttagacatagagcaaaggattaccatcctacaatccacacctccagagatgctaggaaacaaggtagaccctaagagagacatacatggtcccccagagaaagggaaagagacaggatctcctgagctaattgggaccatggggagaggggagggggggagaagaggaggggagaggaagacatgagagagctggaagattgagtcaggggaagaatagaggagagcaagaaaagagattccataatagagggagccattataggtttaaagagaattctggcactagggaaatgtccagagatctacaagtttgaccccctactaacaatataagcaatagcccagaggctaccttaaatgcccttctacaataatgagattgatgactaccttatatgccatcctagagccttcatccagtagctgatagaatcagaagcagacacccacagctaaacactgaactgaactctggaatccagttgcagagagggaggaatgatgaaccaacgggtcaagactaggctggagagacccacagaaacagctgatctccaacaaggggaagctcaaggaccccagactgagagctgggaaatcagcataggaccaacccaaaccccctgaacaaggatgtgagtttggaggtctgggcaatccatggggcctctggtagtgggtcagtatttatccctagtacacgaatggactttgggatcccattccacatagagggatactcccttagcctagacgcatgggggagggtctaggccctgctccaaatgatatgacagactttgaagattccccatggaaggcctcccctctctggggagcagaaaggagatgggatggaggggcaggggaagaggggagggagagggaactgagattgacatgtaaaagaagctttctgtttcaataaaatatataatatgtataaaagagtcaaggatattgcatactgtcaattgtcataaaagtaaattctgccaggttacctttttaaccaatgttcatcaccctggtccccatcaactctttatcaatctcttgaactgttgtggaactcatgtacccacccccaaaaaagtacttatttggaagaaatccgtttcacctattgaagtttttcttcctctatttctttgtgatttagagccctacactctcagtgtttgctgtgaggagaaactacttgacaggtactgactcctggatttaatctctgcttccctgagtttctcccacacattgagactatttcgagattaagtgaagaacattacattagggaaaaaaagggttatagtgattcatgagtcaggtgtcctccgagcacaggtgcctgacttccaggcctgccttggcttgctttgatttagaacagtatctattatccccactaccttgcctgttctggatttaatgaactctcttcctttctatattgttaaggcttatgtaaaattcaaagcctgtgcttctaatgctgtgagtatttcagtgacggactcccccatgtttttgattcagttcaaaattctgattcttttcttaagtcctttttttttaaccaaagggtttatgcaaattagttttaaattccaaatatttgaggatttttttcacagacttttcttttattgtttcatatttgattttattttagtcagagaatacatgagtcaatgtgagacagttgtatgacaagagtcactgtcacttccctgagacttatttaaaattcagaatattgtctttggggtgaatgttctatgtgatcaaataaaggctgacttctcctaagtctttgagaggacactccgtaagtcttaatgtcagtgaaattagctgtcagtgtcttcagattttctgcatgcatgctgatttctcacaaaatagttctctgttcattaatgagaaaagggtttgtttgtttcttaaatcactgaatagatgagatttttaatttctcattctgtttgattcatttttgttttatacatttaagattgctcattagttgtatatatgtctagtattagtccttgtttaatctggttatgattaggtgattattcttaaatttttctcacattttgacaaatgttggcccttacagtttggaaatattttttgcccttcatgtacagaggctgcaagaacatgtatagtaggcttcatgaatggatactgataagatttttttctattatatgctctatgttttcatagagatgactaatttgtttcttatattatagttaatctactaattcccttcagtgaatttcttgtgtctagaaatcagatgtattatttttatattttatttttcttactttttcataattatcttttataacttatggagaatatctgcaatagtcattttaatacctgcatataatgcagtgacatatatcatttcagaattgagttcagctgattactgtcctcatgatagctcatgagttttcccaatgcttggcagtgcttgtggtttcatcctggaagccaaacactgtggactttattttgctgtgtgctgaatggtagagtgctttaacaatatccttgagttttagtcttgcatgtagttacttttcaatagtttgggggtttgagactttcttctttttattattacacttatttatttatgtaggtgcatgggtgtgcatgccatggtgagcatgtggacatcagagagacagttcatgggagctgagtctctccttccgtcttgagggttctagggcttggtgccatatattaaatgaccccctccctaacctgggcattaaggagtctagctctctttggtcctatgaggggtcaaagtttattctactggttcttttcaagtggcatctcctacagatgtgctgatccaacctcagctcaaaactcaaggagactttctgaagttcttcaaaacttcctctctcctgccagctctagctgctttggtctttctgaactcccagatttctcccctcggcttagattggtgggctatccctgtttcccctttgctctgaggttaactgggctcgttcagtgttcatcaggtttgtagcaggatccttgctagattgctgcctacattatatatggctagttccgccttgggagaaagttagcatacctcatggaagggctgcaggggataggagtattgtactgaggacctgagagaatatgagggtgaagtggcatccccagaaaagattccccaaagccctttgcagtatgaggtctagatgtttattcgcttctacaatgaagtcattattctgcaacttggtaagtcaccagaagaaatggctctggatcttccaggtggtatgttttctgggaacatgactaagaactcaatgtataatatgacctgagttacaggaatatcatttagacccagatacaccatgatttcacagcacagagccaaatgtccaacctcggtttctacactgatggaccactttgaagatctgttggccacaactaataacaataagaaaataaccagattttatgtgaagtagaaaatgaggaaatcaaattgaaaagcataaagaaaaatacttgaatctataaaacatatctgaatacttggatctagagaccccaattaaagacacagactatttccaacttgttggatcgcctgtgttgttggatcactcaaatatctttgaatgtttattgggacatctctctttggaaaataatttttctataaccaccagctttgcagggatacgaaagagttagacacattaaaacgtgttgcattcttaagactttaccatgttttttaaaatgtgtcatttgcttttaaaagaacttgtaacactacatagactgagcaggttatatttaggaacatatgtatatacatatacatatatgcatgtagtaacaattaatgaaagaagaggccatgaatttgaaggagagtagagaggggtatatgggaaaatttggagggagagaagggaaaggagaaatattataattatattataaactcaaaaatataaaagaacttgtacataaatgaaagacaatatgaatttttaaatttaactttaagctcatgggtgcaaatttctcagcacttgttaactaatatagaagcctgattagaaacacatagtattcctaaatctcaagcataataccccatctctagtcagaagtcttatatatctatttctcagttgaggtaaagggcatctagtaaaaacatcacattcaaatactttgagtgttagcataattgtttgtatttcttgtccaagaaagcaatccatctccgtttgtagaacactgactacttagttcaagtttcgttttcttttcaaatgttgagttcaccaatgaagcttggattatatgcatgttttttggttctccttaaaactttatttcctttgactcaattaaataaaaacataaaagtatggcacataccagtttctggaataatctattctggagttaaaatgaataattctctttataacctgaagtttggcctcatgagactttttacaccattatttgaacaaaatctttcactgatatagaaattacatgaactaaagaaggccttagtgagacctgatgttgttagagtacagtgttccaaggacacactttaaaatgaggaccagagtcagatttctcttctttcacaaattaaagtgaaaataccagttaaactgctcccccagaatttaataacatagcattaaattaatagacgttaatggaagtgtgaaaggttattacatcaaagaatgtccaataacaaacaaattaggcagggttttaatttaccactttgccatgactttgagaacaaagagaaacaaatcaatattgttgcagtttgagtatttagcattcactagaactcatttgccaagctcccagtctgtacctgttatggtgtgttaaagatgctggtgtctacaggcttattttttacataatgtttaaattttattgcccaggtttagctccacatccctgagacttttaatgaatgaataacttcacattattttagatgccttggttttttgttgcttatttctgtgcacaacttatagcaaaatgtatgaaatgaaacccagcacatgagaggattatgcatttgaagtcaatctaggatcatgaattggaggccagattgggtatcagtgagaccctgtcctagaagccaaaacaactaccaccagcaacctttaatggaccagagttccagagtagtcatgtttctaactactgctattgatctcttactgtgtctagtttaaaaataaaacttaccataggtgtgtgtctagccaaaaacattgtgttcagtctttactgtccatgacttgggtaccaataacaatcctagagtctatccttccagcacaaaggacctctgtgggttcagtacagactgtgggaccaacagcgtcagcatctcttgggaacttactacaaatgcacatccttgagggtccaccctggaccagctaaatcagaaacattgcaaggaggcccaggtgtatctactataataagaccttagggcaatttaaatacatgttgaagtttagaaatgtccatttaagattttgaattctgaggctggactagaataacttctagaaaattgtatttcagaggctaagacaggatgatgacaacttcaaggcctactcatgatgcagagagaattcaaggcagccttgactgaaacccagttccaaagtaaaaatataaaaggaaccgggtatgttgctcagtggcagggcacccgcctagtatgtgcaagatcctggcttcaatccccagaaccatgaaaaaagcagggaatggtggtacactcctttaatcccagcacttgggagtcagaggtaggtaggtctctgtgagtttgaagctagcctgttctacaaagtgagttctgtatagtcagagctacatagtaagaccgtatccaaaaaaaaagagagaaagagggaaaagaaaaataacccagtgtcttttcttgtgctgcttttcattctttctctgtctccttccataatcgatatataaataaaccaaaaacaacattctgatgcttttggtttcttcacatgtttatcttgtttccctagtatattgggggcagccgcagagctgggtctcaacagagaccagtgttcattgagtgcatcacctagttctggcgcaggccgtctacagaaaacatgtcatttcacttactttaattcttcattgcagccttcaaaatcagctggttttggtatccccgttttacaagcaggaaagatgaaacaaagacaaaagggcaccaaccattcctggctgagccttcttgctgcatcctgccagaggcaaaggttctgtctgggacttttaaggtcacttctcacaacctaattgtcttctaaaaaactctgttcccaaaagccatcattggggtgggagtaaggtggggtgaacttgagagttgggcacgaccattcagatggctgcagagggaaagcaggcaaaaactactcatccatgtgctcacagctctcaaccagttaccaccttctactccctttagccatagagataggggcacctgtaattacatcagttggaccagaagatggggacagctagtggctttgacagtcaggatttcagtttctaattgaatatcaagtgtgtgaatgttatttgtggcaatgagtgaagaagaaaagttgtgtccattgcatagcccgccatgccggcatctgtgtttctaggtcttgtagccatcacgagcgtttgtacattgtggttggaaaggaggataggttggttctagagcctgggtaccactgtgagttgtttagcgtgccataatataatctgcttggggttgaaagctgtgttgagggataaccatcaaaaccttgggtgttttctcccagaaagcgacccttttcgagcaaccatgtgttaaggattcccagagggcacacacagttgttttgaagtctcggggctttgcatgcacccatgccctctgccctgatggttctttcccctctcactttccagtcacagcagaagtgcattgtgatcttcgccctggtctgctgctttgccgttctggtcgcgctgatattctcagctgtggacatcatgggagaagatgaggacggactctcagagaaaaattgccaaaataaatgtcggtaagaggtaacaaccaaaaattctcttttagggggtgggtgagaacgtcagggaggggcctgggtggggacaagagaaatgtctgctgggatctgttttcatggagatttagcagaggcctccttccctccgcagaaatgcctgcatgtgataggtcgggcactaagcaagatcaatgatttcatccacttgacaacctggccctagtctatacagaggtggttgactaaagaaagtatctgacagtctgcatttctggagacttctgtgtatgatgttttgattcacttcctgataaagcctaggacatacaagtgcgtggatggacagagaatgtgttctagttgtttaggctgtagacgttaatgcctgcatctcagggtacattgtatcaggtaagaagggaagctcccccagtcagctggcaactgcttagcccaccattggttgtttgcttattcattttaatctagactttacaacagctgtagtaaccacttactgtcatgaggcatatcttgagatttcagtaattcatatatgtctgggatcccataagattcattgcctactggcagatattcatatacactgtgctgttcaagtggtgatgaaaatcaactaaggatgtgtttctcagaacatgtctccatctttgcatgtatgtgactgtgttatgcgacatcagttacgttatgtagcatctccctgggattctccctcacccgtagagccatcatggtgtggattcagcctgaaaggtctccccttctactcttctctgaactgtgcctttttacattttgtatgtatgaatgtgtgtctatgtacattgtgtgtgtgtgtgtgtgtgtgtgtgtgtgtgtgcgcgcgcgcgcacgtgcgcatgtgcacacgtgtgcatttgcaaatatgtgggcacatgtcccagaaatttcaagcgaaggtcagagaacaacctacaagagttgattctatccttccagtgattgaactcgggttctgaggctctgcaacaagcccttttacccactgaaccagtttactttttaaatttttgaggttggggattgaactagaaacataccaagaagaagctgttgccaacgtcaagctagaaaacaagagagctcgtgctgatgtaaaaactacagtccaaactcatgctcagctctccttcataatggctgtctgaattttgtgacctcagttcagctttacagtaacacctgctaaaaagagatcgcgtggacagcagcgtggtaatgggtacacacactttaccctggatgttttgcttgaagttgaatattctaggtaagaaatgttctgaaaaagtaatgagctctccacccccacctttgatccactgcaacctagttatcaggcaactaatattatatacagagcaaaggacacaagaaatagccacccactttggatttttatcctcaatattagaagtgtgttctttatcggtctaataggaaaagagttgaactgggttcattatttttaaaagcaatagaacaatagcacatggctatttgttctatttgttgttgctgtttgtcatgcatcaaatatgagcaaggggactagggatcagagacagacaaatagctactgagtgttagcactgtgctttcctctccccccccaccactttgcaggggagatccctcggtactttaagtacaaatcccagtatctagaaagaaacttatacacaggtcaaactataaaactcccttaagacaaaatatccctgcattttcaaccctcattaatgggtcttggtgggtttcaaaaacagcaacaacagaaaagacgtagttgtaattgccctttgtttcacttagaaggtatcctttacttaatttgtgctctttaaaatttttattaattttttcacacactatttttgatcatattctttcccctccctaactcctcccagatcttgtccatcaggaaggagaatgagtggagacaaaactattttctaggtggtggagcactgagtccacagactttagatatctagttatcaagatagaaaacagtaccagagtcaaattctagaggcataggttaaaaggaaattattttgctgttttcctgtgtttatgttttgttttttgcttctatgttctgagttttggtggtggtggtggtggtggtggtggtggtggtggtggtggtggtgtgtgtgtgtgtgtgtgtgtgtgtgtatgtgagtgtgtgtatatgtgagtgtgtgtatgtgtgagtgtgtgtgtgtgtgtatgtatgtgagtgtgtttgtgtgtgtgtgtgtgtgtgtgtgtgtgtgtgtgtgtgtgttgatagaaacaggaaaaggaatgtagactctggtaactacatggttacatgaaataaccatctagtaaccatccctgttgatgaacatatcttccagaactttctgtcccctcaaatatttcctctgtggccttcttcccatggcctgtatttctatttcttttctgcactgtcattcatcttgttgttttttgtgtgtctgacaaggaacatcttgctccccacccccacccaatccactgggaggtctctgcttcccctcctctctccagtgcatgggagtaagaggtagggtccctatgaggagtaagaggtagggtccctatgaggagtaagaggtagggtccctgtgaggagtaagaggtagggtccctgtgagaccttatgcctggatttggttccccaaccaatgcccaccatcttttctgatcattcccacttgaatgtcatgaattttcttgcagcatctactgtcccttcatgtcaccataggtgacatcaccttttgatttccatggtttgcttctacttgtgtgtctactatacctctccaccatcagtctcatccttagtaacctcaaaatgtcctatcccatgctgagcctcaccgttatttagcctgtacctctcttctgcacctgcctgccagcaaagtaactccctcaagttaggaaaatgcaggaaatggccaggactttgaaataataaggatctggacctaaactgcattctatcttctctgggttctgtttgcttgggtgcaaaattaagtctctcacgtactgtgagaaaccccacgagacttaacaaggagttctgaggcaattcggtgagtctgtcacaatagaccatgtcacaatagaccatggccaaaactatagtgggcatgttcaaggcatatggagagtgacctgacatagtgaaaaaaaaaaaaaaaaaaaaaaaaaaaaaaaaggatgtctgtctttggtttctgcatgcctcggatgggttattaagttgactttagtctcaatttccttaaaaatggctgaaattatcaatagcctgtcctacaaggtctatgtggattcagtgagttgtctaaatccatggcaaagcaatgagaaatgtaacaaacaatataaaaatgttgattctctccctgtttgttccaaagactgcagaaatccctcgtttctgtgttcccttctaacctctcactacctgcttgccctgaatttatctttagcttgattttagtctttggttctgtgaaaatgtatgaatatgcacctcatgggaacatagggtacattcagacatgcagagcttattgtagcaaaggtgtcaaacccaccactgtgttttccagagatttgggggcaggcatagcagtgggaggaaggcggctggaacttctcaagaggaagctgcctatgtggggcagcatcaggtggccagcttgatttgtgactgtttagagaaagcatgcttggctttctctggttggccctgagtctaaagtaggggggaaaactcaggaaagctggagtgattcactaattcccagccactagaaccagtgatcatctaaattattgtttaactgctggcaccctggctgaagatagcggtctcacttcctgcaggcctgacctggtttgtttcctgggcaagttgctacaagatgtggccagagctgagttgtggtctcactgtggaatggctgttatccctttgtatattcagtcttcattccacaaacttcccctgtacttatctgtcccttttaaatgttcatttgcttgttagtttttggtttttaagaaaggatcttatgcaaccctatctggccttgccctgctagtttccggcctgtgcctcccaagcacatgaactaccacactggctaggctcttctgttttaatttgccctagccttctgccagaccacaatgtacacatctccatgcttcctccagcatcaagagtggcttgcctccttgaagcatgctatgagtttttacctggccctcccatccttgtcctcagagtgtttgagctccatgtgttccagctctttttcctccaagcacagatgccggtagtaaaaatgaccaggctgttccaacagagatacaccctgagttctgagactgatgcagcccggcaggaggaaatgctctgatctgcagatgctccccagaaggttctcatcagcttcaccctctgagttattcaggctcctcctctccccacctcatccttcctctggcttttttcagacttctctctatggtgacactcattgtgtcaagtgaaatgacactactctccatggctgtgatctcacagagttagagtctctctgtaggcttctctcctcttggtagtgtcaccagaaacagagccatgtgcccagggcaacctttgctgggatctgttacttagaaatcaaactgcccatgtctgtctgtctgctcactcctcaaagttgaaagcagcctagtagctggcagcaatcttctccgtgctttgacagcctcttcccaagttcttttcctccctgctcttctccaaatatctccctgcaattcatcttggttggctcactagcccatctgtcccataatggatctcgggtctgaatctcactgctcagtcagctgtctcaacgcttatacttttgttaatgtatctcgccatgagctgtcttgctttatttcttgtcccccagcttactctgctgatgtgtgactgactacactaacaggacataatcatacactcacccatcattttcccatgtagatctataaaatgcaaattgttcaaaaaaccgtcctccctgtacctcttgtttaagtttaaagacagaatcttgctgcattacccaggcagcttattcctgtggttgagttcgtacccctgtgctatttctctttggagacttttcttttgtcaggacacttgcccttcttgtcatctcaacactcctggtccagaatcacaacccaatttgatttgtacttttcctactttgctatttcccacatacaattggtatgcatggcaaagttttgtggcaactttggcttctgttggtgccattggcacttttgatcctctcattgcataccaggatggataaaataaaaaaatcctgaaaacaagaacccacacattgtcctccccacccctgccatcgtacatagtacttcatagctcaacgctaagcttttaataggccataattttcatgtgtacttggatcagtacttgggatagtactgttctttggggtaatatgtgtgacttgggttaattttttgtacttccataatgaaatattttgtggggtaataactggggattatgttgttgcaaagactaaaatgtagacgatacaactagagactgtcatgaaaacaagttatcatgtaaccacacagttatgatctctgcttcttgatggcagagtaattgagaaagaagtagcttgaagacaacaagctttgcttgttaatgataacatcctgtttcccttagaggatgatgtttgatacagtctttcttccttaacctgggaccaggcacaggaggtgtcaagaaagaatgggctttgtgcatcactagctaacctcacttggcagtatgtgggagctaatccctaagagtcaacaggagcaaggagaaactgttcagagctgtgtctgggtctatcataggcagagggacttctgtgttctttcagagaaaagaaatgtgtagaggaattgttgaaatgaaattgaataatttaagactatatttttttctaaccgacattaagtaaataaaaaatttcaacaataattagaagcagaagataaaagcttgattctaaatgaaggctaagagaagcctccgaacacatttcagagcagacattttaatgctctaaacttgactttcatacataatggcacatattaacattcactattgagccccatcaaattcatatttcctaaatatgagatacttttattagtagtcatactcagaaaatgatgtttatatagccccaagctgaaagaatctgaaattatttttaaataatacctcatcttcaacatgttgtgccttaaaaggggaaatcggggtgagtgtgacagttcctggtggcccataattaccactcagggaagcagcagacgctaattatttcaaagttttgattttaatgaaacttaatatacaattaatgatgctgacatttcctgttgccgggttggttctccgagaagatcgtttgaatgtggtatacatttctcaaaaagttcactgagcctttctaagcagagccgtacctgataatcatgactaatgacaggaacggttgtcagcagcagacagcaaagatggtagctctgtgaagacattcatagggtggcaaggagaaccaagactcaacgagaaggagcagaaacactgacagaaaatattgctgttgctatgatgtgcatccctgtggaagtcagaagcctgcagtcagaggtcagagggtaacttgcaggagtcagttttctccccacactttcaaacttaggttgccagccttggtttcaaattcctttaccagccgagcaatcccaacagcccttcactgcatcatttcatcccaagatttattggttttagaagattatttttctctatgaagttaattttcttggaaattccacaggaatccctctgctcccctgcatgcaatgttctgtacacatccctgcagtccctatgggttcaatttctaggtgttgcccatctttaccaatgtccaccctccgctatggttactccacataacttcctgagcccacaaacaccagatctcagtgcatcaccttcttggctgaatgcagcctctcggcctatctccatttcacaagcctcataggagacagccttacttcaggatgtgtgctcaggctaccttgcttcttggtggcttccaggctgccgatagctgacctctgccaccaggcccttgctactgacagacaccagtgtttgccgtggaataatccttctgtacactgtgaatatgtattactctcattggtttaataaacaagctgactggccagtagctgaacaggataaagttaggtggaaaagacaaactgataatgatggcatgagggaaggcggagtcaggaatcgccacccggatgctgacgaagcaggagatgaatgtgtcatgctaataaaggtactgccacgtggcagagcataaataaataatatgggttaatttaaaatgtaggagttagttagcctgagctattggccaaacatctgtaattaatatttagcctctgactggttatttgggaactggctggtgggagagaaacatccaagtacaagtgctagctagggttttcattctcagccctttaactcatctccatctccacaggaatcttgtgttgcaaaataggtgtcttgaggttaatgaaaattcccattagaaatctggactaggtatggtcatacatgccagtaatcccagtactcaagaggtcaaggcagagaaccataaattcaaaaagaacctgaacttcaggacaaaaaccttcctcagggggaaagaatgagaggaagggccattagtaaaagaagggggcatggggaaagagatgaaaaatgaacaaaacaaaagaacaatagtcacttccagttcagcccacagcattaactgagctgctgaatgtcttgagtatgggtttcatccttcacgctgctgtttgttttgtttgttaataaacaaaacaaaataaaccacagaagtatggctaagagggagactttcctccccagtttgagcacattaggaatatcgagccgtggacattctagaactcccaaagcattcacaccaatgccttttgatctctcaaaatgatcttaaatgtgtattgagtttggctcttgcttggtggcaagtgaaagtcgaatccagggatgatttaacaacttaagatacactcagctgaagtggagtctatatctagcccagacatgtgacattccagattgattttattgctttgtaacctcctgaaattcctttcaggtttaggaagtgataattacactcaggctgagtttggatccccagcacccaaattaaagtcagtgcagcagtgcatagctgtaatcccagcaaccggaaacaggaggatcccaggggctcacaaatcagccagtcaagaaagagcacaggttaaattggacacacacacacacacacacacacacacacacacacacaaaggtagaaggcaataagagccccacttgtcttcccatggcctccataggcacacccacaagtgaatacacatgcaaacgcacacacggcgggtgggggagattattataccttcagagggcaccgtttttattctattgaaacagtctcctttagaagttgttcctcctcctactcctcttccctcccctcactttctttcttcttctggcgtttgcctgagagacaagacaagccttctcatatatatgcttaatcaccccttatctgattgactctttggtcccttttacaactttggcaaataatggagaagtgacatttgcctttgtaaacatcatcatcaaatttgcattccttgcttgatccagagatgcttgccatgcccaagaagacacactgcttgttactgcaaacgcttgagagaacacacccgaatcactgcattctgagctgtctgctcttccagactgcacacttgcttatcttactgatatttgagtttctggcaactggaaccctaccagagtgcttggaggacctaagtgctgaggacaaagggaatgaaggactgtacactgacatactatgtcttctagtgcccaggaagagtgggcagtcaaatcaattataaactaaacggagaacggagaacaaggtggtatgaaaagtaagaggaactgggtcagggaaggaaaacctcacatctctgctgaactagtgaaggaaacctcctctgggtttgtattttcttctgtctgaaaaaaaaaaaaaaaaaaaaaaaaaaaggcaacctatcaaatctcctcttcccttaaacgatgtaagtagtcaggcaaataccagatcatcaggagagttgatgccttgtttcattaacatgtctccaaaatgcctaaccatagcttcagaatttctaagcttttggatttacgtgtcaacgtttaacggatgaacaggatgggttctctgtcaagatgctgtgttgtggagggactgttaaatctaaagctacaaagagaaactactagtcactatcattaagaatatctgagatggaggagtttagacatgcattcatcacccatcaccttgtaaaggttttaaactgacaggtggctactgccaaggacacacaggaaggagccgatggctccagggagcaaccaaactggccactggattgaaacgctactggctatttcttaatgggagccacagcaaagacttgatgagatacaagctcagttttaaagacagcaaacaatgggctctgtgctagagtgcagagtgcaagcgagaagcaaaggaagagggatagactttgatcactatagggggccaaacacttcagacttagagacctgggcttcattttgaaactcactgagagccactagacggtcaagaatacagagctggaggacaggagagttgactttgtggttaacagcacttgttgatcttgcagagaactcagattggtccccagcacccacccagtaactcacaaccctctataactccagttgcaggaaatacagtgccttgttctgacctctgttggtgacgggtacacacatggggcaccaacgtacttgtaggcaaaacatctacatacataataaatcctttagaaagaatttttttttaaaatatggacagaattctatttgctttctctttgctccctgcttgccaggaggtgaacgggttcctgtgacacacgttctctccatagtgtatttctttttacaagtccaaagcaatgaggccaagtagccctgggttaaagcccatgaaaccatgagccaaaaacaatccttctccctttaagtgcttcatttcaggttagttgttatagcagtggaaagctaactaatacaactctttcctctaagacagtagctctaaggatattccaaaggggatagtaggtttttgagacaaagactcatgtggtctagtcttgcctcagacttccagtttggcccaaactggcattggatccctggtccttcctctcccgccttatatgttctaggatgacaggagtatgccacctcacctggctaaaaggcggtacatttgagatttttttcaaaaaccactctccaacacataagtgactgttcagtttttaactgggtgtcaaaatgtgggtggaaagttcagttctgtctggatgtggtactgtatactgttatctaattggaaaggtggggtgcggctcagtttgtagagtacctgcccagcacatacagggccctgggttccatctgcagagcactgtcttctaagtggaaatgcccagaactatgcaaaatgtaaacaaacagtgctgatggataaaggccacctggggtggtgctcaagtgagagctgtcaaaatggtgacagaaaagggcatggtctcccaggggtcaggatggagaattaaaaaatggatttatgactacttccaagtcaacattgatttttaaagtttttcaaggaaaaaaaactggaaagggagattgaaaagaaatgcaaagagagagagaaccagagaaccacgctggaagaggctgcctgatgccacagtaaagccgaacaaagaaaaaaccctgttgtgcccaaagtggacattttggccatggtaactgattatataatattgattctagacaaacacgcatctttggctttatattcctgcctgcaatatctaataaaaccagagggagaaacttgctgtgtgctactctttgagtggaaagaatgtatcccaatatttgttggtctctaaattgttttgtatgaatagctgaccttagggataaccaaggaaagactttgtcttctgaaaatcatgatgcttgttagtaaaaaccttacatctcctcctagtggattcctctccacctattaataactattttgtccaattatatctttattcttcataaattttcttacttatacatgtatgtgctctacagggagccacacctcaaacccctaacaagatttgaatatgaatggaagtgttttcccccagaataaacatttagggataaaaggattcaccttgtaaaaataaaaacttcaaatgcaataggctctacaaactctctcatgtcaactataaaacatgaggaaaatgttatagatgtgtgtgttggagacttttgcttgtttgcttctcatccctctgcctagagctgggatttaaacccagggctttctgcattctaggcaagtgtccaaccactgagatataccaccagtcctaatgataatattttccccctcttcaatttgaagaatgtagctttgtttcactatttctaaggagacagaacattttaaatttctctccccttctcagtactaagaatgggacctaggacttcacatgtgctaggcaagcacgttaccactgggacacaccctcagccctgaagtttccaataggagttttattattctggataagtatcattgaaaactgttagcaaataatgaggggtgggccagcatattaaactgacctagtgcctatacccagagttatagcttgctgtgctaagaggtggatttatagtatcgaaagagtgcttgattccctcatttattcaaatgcaatgatactaaatgagccaaatgcagttatagcatttgaatttttcataaaagatagaaaaagataccaaatatcccgacccccttttaactcaagtttcaaggggagaaggggctgtagtgtttacctttgtcttgctttctgaagccagatgtagccagatgatgaacgatctagtaattttcttggccatatgtaagaaactttaaaaatgtgttttttcatgctttgattgggctaggagaaataggactgcttcctagctgagaatccaggtctgatgcctaggagccaagaataggcattcattcctatccaaaggaagagtaatccgagcaataacagcaataacgctgcttctcatttgtgttaaaatagcagctaggtttgactcccagaatcctgaaagtctttttttcgctcccctggcttcctggaaaaaactcacagtaagcagattcataggagagaaaactatataaatgtactgaagtggagaaacagggagtcacagaatgtatggacaccaggaagccaagggtggcaggcttaaacataggagagaaggaaatggggcctggtgtgggggcaatcctaaagggataggcaatgattattaaggagataggatgggctggggaggcagaaagcaatgtgattctatgggatttgcataaggcccaaagatgggcgtgcccatatgcaattacagtcctgtcttctctttgatagtcctctttggtgggccaaatgaattctggggagagccgctccctctgcatggtggccatgagagaacatgacaaggctagaggaagggaccttgattttgaggcagcttctaaggctgccttgtcagcatgccattctttgtggtatcttttttctgagccccaacagcaggatgattttaaacaaatagaagatggacaagataggtgatttaatttctaatcagaagtgctgaaactgtgatacagtaagattctatgttgagctctcgactcctggcataactttgaaacggctttccattgtgaatgtactcagtcagaaacacgcatggcgtgtttgtgactttccccagtgtcagcatttaccgagtagcaataacctacattgggtttgttgactgcaatttaccaagtagtctgtgtttcccttgatagctggctgggacaaacacaaagtttttagcccaatctgatcatatctctgactacacatgaaacagcatacagtaaatctcccagtgtttatatacctgcataggttgcagaatggcttcaaggagttcaagatcagaaaaagacagagagagacagagagtttcctgagaggcagaggagactaggagactaatcttttttttttttttttgaaggctgctgggggcacaactgaaaagtcaagccatgccttggggttgagctgggctgtctagggaagctacaggaccatgacagccatagagtcaaaaggaggactgagctaaagactcaggagcagatggaatactcccggatgccttatgtagacactgggtgatcagatggtaggccagtgatggatgtccctagctcagtgattgctgtcctcgctatggagtccaggtgagggcgtggcacattttcctctatctagtaggctcagtaagccctcaggcctgcttttctttttctttctttcttttttttaaaaaaaacatttttaactttagaaacaatcattttacatataacccccccattccctctccctcccatcctcccagtcccttcccaaccctcccagcccacccaccccttcccaaggatagtgaggccttctatgggggatcaccaaagtctgtcacatcatttgggtgagggtctaggccctcctccgagtatctgggctgaaatagcatccctccatagagaatgggatcccaaggtccatttgtgcagtaaggataaatactggttccatggttaggggttccatagactgtccaggtctcctaactggcacccacattcagagtgtttggttcagtccaatgctggtccgtgtgccctcactaggtcaggtcagctggttctgcaggtttctccagcaaggtcttgactcctttgctcatcccttctccatctctacagctggtttccagggttttgcaggcctgattttctagatatgattttaatgtaccaatgtgatcatgtggcacatattcactttggtcaactactaggatggatggcagtcttctgagttttggtaacaagtcatcatcattgccttgtggatggtcaggacaggtggcgttatttgtgtgctcacagaggtgcagtcattctgcctggatttgcactcagatggcgctaaatgctgcaagcagagtcacccagggcaaggcatggcctgaaaacccactatttcatatgatggcaactaacttagagcagggcatagcctgatctcagcattctaagtagtttgtgagagcttcgggatttcacggaaaaggcatgcctcctgagaggtcccggtggatttcactcttgttactccagatgccaaagacttcagactccaggcatattgagatgtgttagttgtatagtaaggactggaacccttaaatctgagcatgaaagattaaagtgtgtgtgtgtgtgtgtgtgtgtgtgtgtgtgtgtgtgtgtgtgtgtgtgtgtgtggtcattcttcagttgcctttccacttagtgtttttgagacaggatgcctctttgaacccggaactcattgatttggctagactcatgaccagcaagctacaaggatccttccttctctgcctttccagtactggggtttgaagacacagtgatgctgtcccaggttcttgtgtagatgctagggatcagactcaggtccttgtgcttatgcagccagggctctattgagcacaccagttccccagccctgagctgttttaagcacctatagactcaaaattcccacccatggcatcagcccctccactgcttggacctcagctttcctctgagggcaggtaattgagtccagggagtgcacacagaacctgcaacagactgggcagtaaccatctagactctaagattctagagcccctgcttatttttgtggaggacattctagaggcaggaaatattttctacttttatgggcaataaacattttgtcaatgcaagtatgcaatccacagcctacttaccttgtgtttagcaaagagtaattgaaaccatttctgcttagcatgcaaactatcttttcaattgaaatgcagttcagcctttgatcgctataatgaaactggcttgctttttattttcccagcctgattttatctagctccattcttgtatcatggacttggactcagtactccttttctactttaaggcactcctatttgcctaaaaatagtcccgagggctgcctttcaatgcagttacaacaaattgctttgtggtgaagcagagggtgaaacatgttttcatctcgcttagtcaaaatttcgtttctcatttgatgtatttggtgaagataaacatctccacacccaccaggcagtgttggcacacacctttgatctcagcacttaggaggcagaggcaggcggatctctgtgagttcaaggccagcctggtctacagagcaagttccaggataggctccaaagccacagagaaatcctgtctcaccccccctcaaaaaaagatcttagtgcctgattgccaagatctgactgggggtatatacactctcttcctttgaaaacagtccgcctctctaggatccaacctggagcacactccatttgctcactttttatttcttttctccttgagccgtccatggcttcctcctcatttgcgacagtcatctgaccatatagtcaacctctgatcctagacacttcgttcattaaaatagttcagggctagaagaggtcaaagcttgttaaaatgaagattttttttctactgttatactggaagcaaaattaaatgtcatgatatggtttcttactgggtaagagctttagagttgacttgtagagttctgaacaggagcagcctcctagagaattgaagaaaagctgcaggcattgctagcagagagacacctgggctctgttgtgctcccctatcagaattacccattagacattagacctgtagaaggcagagcagaggcataagcagcacagtcccctgatctcagcactcaggaggctgcctgttgatagactggaagtgactatcaggtgtctcctttggaaatgacattagttcactgaaaacccaagagagaattaaccagccttgttgcctcaagccacgtgctgtcccttgattcgtgcggtaaaatcccaaatcaacagccaactcaagcttcctctcctcctttcttgtttttccgtgtacactttcactttcatctgttttgtttttaactaaataagcccgtttttggcacagaaataatgtctgtcactgaaaatagaaataacaggtttcaagttggctcagctcatttttgtgtgtgccgccaagcctgataatttgagttggtaagcacatgcatccttgcacacatatacactaaacgcagtttaaaaaatagaaatagcaagatactgtaatattgccaggcattttgttcatccaatgatttactaaatgccaaacaaggccaaactttgtccagtggaaaagaaggctctaaggagaagtcacaggagacaggtaagatagcactgtcctgggggccttagagtagcaggggaagaccaagagatgagtggataaaatgcaggcacagggatggatgggtaaagtgatgctaaagaacaaaaatgctgtagaaggaagaaaacacgcgtgtaagcagggagggaagatcacagttctgtatatgaatttgtttttaaccaaagattttagaaaccttgagaaggttactttctttccttatcaagcagagaacatttgctcattcacttaaaggaggcagttttgtattggctgatagaggattcagaggcactactggggatggttccatgttcttatgactcccagcaagaaatgagcaaagactcacatttgcaacagaagcagaggcaatttactaagtgacagaacatttccagggctacaaagatggcctggtcagtaaagtgcctgctgtgcaaacctgacttggaccccctacgacccatgtaaaaagcctggcatggtggtatacacctcttattgcagtgctgcagagaaagaaccaggaagattcctagagcgtgctggtgagtcattaaacaaaaatagtgagctccaggtccagcaagaggtcctgtctgcaaatatacaacaaagaatgattgagaaagatacctagcattgacttttgacctctaatgcatacatatgcatacatatgtacatgaacatgtgtgtatgccccaaaacatgggaaatgaggaaagaaaaagggagagaggtagttcacttctaagggaaagatgtcaagagaaaaatttaagacctgtcaaggtataacaccttcttgaaataacttagggactctcctaggaggctgtatcagagacctgtgttgctgtgataaaatagctaagatatacgccttagaggatgaagaataaacagatgtgatggctgatgcctgcaatcccagtgctgagttgtaggctgcagcaagagaattgctgtgagttctaggcatcttgcactgtgtggcaaaaccctgttccccctatgcctccaaaaggaaatgatgtattttggcttaaaatttcacagtcatttatagctacagagagtgggggtgaaaatgtgcagggtcataatgacccctttcagggcatgaccccaataaccttatttcctaccactggaagtaggccccatctcttaaagatcccaccaactccttatagcaacagcctggattccaaaatgctacatgtcacccatataagatctgaatgacagcagtggtcctcagagtctttgtgacactgacatctgtcctgagaacacataatcacactattttgaattgcactctactgtccctgacactttgatgagcagaccatctttcggcttcttaaatccattaaggttttatagtgaaaagagaaatttataaatgactgattatgaaatgctttattttattctatgctgagtcatttgcaaattagttagtttcaacatctctgatgaggggatctttttctcaactcttaaggtaatgactctcagctgtgtctccgagtcaccaaaagaacttggaaacatgctatttcagcttcatgccccaccccctggaggtagaattggagatcttcttctaagttgccttcaaggttgatgagagcccctacccaagtcattgggctgaatgtgactgccaacttcctataggctagtgccaacagctttttgtaaaatctattggtatgttggtgtctgacttttcaattttcttgtctctaaaggccagatattaaaacatcccatcccattgcctcatctcagcttatttatgacttgtccacacacctcccatccaaaaccagatctggcacatggtccaacttctgtctgtgtgcaacatccatcccggctgcttgtgttggggacagttctcctgatatagagctagggcttctgaagatggaagaaatctttttgtggccccactactgaggcgtcccctcaactctgcctgtccctccaccattgtgtctacatcagctgctgactataatgtcagctgactgtatgctgccatttcaggtagaaggcctgtgaggaaatgtaggctcaaaatgtgtctagacagagtgcccccaagttacatgtgagagccatactccataactctctgtgtagtgtggtctcacaattgactcactgatactggaaaacaatcaccaactgtgtaaataccacgaatggatgcaatattaacttgtcatatttgtctttgcaacaaacatccatttgtggcaacatgagagtcaacacacataatccttacatctgtgtacacatacatatgttcttatgtgtatgcatgtatatggatcaatgcacatgtatgttatcattataaatacaatcttcctggaagccaactgctggcctctctccagaaggccagttttatcctgaaattgttttgccattgggatgaagaatttgagattcaaactatgttgatgacattactattgaagttgtgggatgcccgcccccgacataatatctacaaaataaaaagtgaacaattcagtgttatccaatattattttttaaattttaccagttcatcattttaaagcaaaatcaatggagatttgacttaggattccagcatcgggggggggggtgtcttgagtttgttcctgctcctctctggctcatagtggcagcccttcagctgcatccccaggcctcagctcatcaagatgtttttttgccatcctttgatttcctttcattttctaaatgtccaatttccaccaaattccatatgcaaaaagaaaatccaaggctggaagtgtagttccatgatctagtgtatgcttagcatgctctgccctaagtgtgagcctcagcaccttttaaaaacatgtttatttaccaatgaagttaacattttcccatggcaggcttctcatgactcttcttgagatttcgcaatgcacaaaatacttccctgcaaaccaaaatggagtacatgatctgctgtgggggcaaaggccgtcgccacccctaccccatgcacttgcctgagaattggcccaaagatgttcaagtcctggcagtatttagcaggtggggcagcagagaagtctgaaagttagcaaagctcacttcccctacagcaaaggaagcatagtggcctctccaggacccgagtcttcgaaaggcacgtgcgtgctgtagactgccttgcctgtccttcatcccttagtcatgttggcaaggagggcttataaagcaagccccttttcaactctgtctccatagccctggggcacatcatttgtctgtctaataaccactattaaatactctcccctgcaccccctttttctgcttcttcctagacaagccacttttccagaatattctaacgtccccattccacagttctctttatttgatccaggataatcctgcatgacttggaactcactacatagctgatgctgagcttgaaaccctcatcttccctctgctctctccgcagtgctgggattgcagggacaggccaccatgtctgacttaggtgaaggttttgtatacctccttggccaggaatggagaccttgttctctttagccatagcactcagaaccattgattgagagtgagtactcactgaccctccatccaaagaggggaagggtgacatcctggtctggctgtcggactctacacactccttcttctctatgggctacttctttggcacttttctcaaaaataccttgtgatttccctagaatagagaatagtttattttgaacacgaaacatggccaccgttttttttttatcttttttaatgaggttcttagctatgaatctatttcttctttaaccatcttctgacccagttcataagattatccccagaagcagagcttagcccagaatttggttcttgcttcatgaagttgaaaacggaatgggctaaaatcttaagagaaaagcactgttcattctgagatgaggcagctgcctttgaatcaagctcctctttatgactgtccaaatcagagtaggaaagaggacggacttaacatttttctaataaaaaaatttggcaagctcttgaatatttctcaattatagattcatttataaagttaattcctacttgatttattgggtaattattaaataattaacaactcaaagctcacatggtccctcattgataatgatggtagccagtaatgaagataaccgtaggtgaagaagtatttcaaagtcatcttgtcccaggttcgtaataccccaaagtggctgtcaccttgcaagccctatgatgtcttggcactgccacttgtcttagccatgtctcctccactacagaaacaatgagggatgttctctataaaggtggtgcatgtcttttgcaaagtaattcattgtatttgttcttcctgagagagagagaaagagggggcctaaaagacagcaggaaatgagcgaaccaggctctttgtttaaccagaataaggggaatggcagctacttacaaggaaaatgggcgagcttgaaaactgggatgagaacaaagtgacttagttttctacttttttttttttatcacatgtgccagtgtttaaaaaaaataaagcctgggcagccatatgtcaaagataatgtgcaggatctacacatcacccataaagaaaactctagaaattaggtgagtgaagaggggggaaactgttctgaatacttggaaataagcgtgatctgggaaaacctgaagcttggcagacaacagcctcctctgtatatccagcaacatgtactcattgtggataacggatacaccacagcagtacagagaaagatgggtacagccatggattagtcaagtgtcggtgatggggggttgggggactagagacacatgctgcaggtaaagaaaaatctttattttcaattttaaaagggagaaggagccgccgcatacaagggtcctcaataagattggtcagcaccaggaacaactatgtaatttgcctggaatcaataggtaacaaatggtggactttgaacacaagaccccacagtcccagggtgggcttttatccaggctgggttctcagagtgtgtctctggggcagcaacagcaatgtgtcctggaaagtggttaggaaatagaatcagaaactgtagagatggggggggcagcaacatttcctgcactgtgtgaacccctcttaaccactgaagtacaacggctgttgtactgtgaaatgctggagaatttgtcttcactcccttctgtggaagatatttagttgcatgagaatacaatccattacctatagttctaaaaatcaaaacaagggttggcaaacggctcagtgtataaaggcacttgcttccaatccttagaacctgagttggatttcccagtacccacatgggagaaggagagaagtgattcaagttttcttctgaccaatgcacatgccgcgcgtgcacgcacgcgcgcacacacacacacacacacacacacacacacacacacacacacacacacacactcatgcatacacacatactatacatatgcaataaaaaataattggtgatggcaaaaatttaaaacaacaattgcctacttacttggaattttctttgccttgccaagtgtgaataattccatttacctctacagatatgaatgtgtcccaccctaaggtgttgcctcccagtccactgatgctttccgtttgcactgtaggcatggtcaatgcacttggtcctaaggtttcacctaaagaactacacattggcttagtaatgaaggattgctaggctgagctcctggaagactgaggctaagccagacctacttctaattgaagctgtctctgcttctttgaaaggcaataagccagtggttctcagccttcctaatgctgtgaccctttaatacagtactgcatgttgtggtgacctcagccataagattattctgctgttactacctaagtgtaattttgctgctgttaagaatcataatgtaaatatctgatatgtgacccccaaaagggtcctgaccacaggttgaggaccgctgcaaaaggctctttctatgcctcactttctaccctgaaaataggcattgacgttgacaatcagtctcttgtatccccatccatcggtggggatggagcatgggtttgtcactatttccttgtttccatcattacttctccacagcatctgcccatctccctgcagacacaaaagctggatgctctgaccatctgagaactgtaagaaggaagacagagactcactcattattcaaatcatagaagagccggaataacagacaatcgttttaaaaggtgttgttgctatacttgaagtttagggaaatttggttctatcaggtgtgctgggaaagtaataaaagaatcccattggtctccctgggaaggtagataaacctcaggaatcacataggcctgcacacagcctgcaagagacaaaaagttaagacaggtgtcaagatctcaggctgtctgtcacagcctgtgtgtagagggaacgcaacctgctagagatggaatctcacattctgacagaatgttggcaccattgctgctcaaaggtcctgctaggtgttactctgtcaaaataaaaaatgaatgaatgaatgaatgaatgaatgaatgaatgaatgaattgatcccatgaccaaatcaagtttggcatttaagcatggactcaaaaatcacagtttgcctgctatttgttgttcttattctgttttttatttcttatatctccttctttgaaactgggtttcatactacaaaccaggctgtacccaagacaggatttaaattccctctgtagcccagtctggcttcaatttcaaggcgatcttcctgccttgcaggaattctgaggtaacaggtgtgaaccaccaagcccaccccattttgtctttcaccaaggtgttctgttgaacttctccaggtgaaatttgcttccatggtcttagtaaagcaatctcagcaaacttgttcttctcagataggagcctgctcaaaatacccgctttgaaggactagacacaccttggaagttcccgttttcatcctgaactgtgatcagaaataattgattaaattccagacagggaaccagggaaggaaggatacatacagaggggcagctcctgtaacaaagcctggaggatagatgctaccagggcattctccatagcctcctcctcctaagtgaaatgcctccactgcccttatgtgaaatgctatttgctaaacacggtcctaccttcccatggaaactcttgattctcatcagacttttagtgtccttaattcttgcctcatgctatatccttatttaatcctctcttgcctctgctaccccacacttctccaaagtccgacgcaacaaattcagaagagggtacctgattgttcactgctggccatggttgagtcagcaagaatggaaaccgttcctttttgttgttgtagtcttttgtctgatcatgatattattatttccctatagtataaagagaaaggaatgcattaaagagtggctaaaccgtttaaaatgactaattgggtaagctactcccagtagtaacagcttgaaaaggtgaagctgtttagctggggcttgtgtctgagaccaacctgggctacacagttaagactctgtcttgaaaagtatataaaaggaataattgtttctttttcatttaacatatgtcaacctaatgacctacaatcagcacttactgtggtatcatttttattagcatgttatttctgatatcatatatatataatatataatatataaatgcataccaatatatgttatatatgtgcaccttacctacctataaacatcttaatttttcattattttaatgagtttaaataatcttataaattttaaaatgaataatgtctacattactatttgaaattcatttcatttttatatcacacagaaaagacctcccagagaatccactgtaccctcatcacagcatagctgggtaaagctgcagttgagtgggagacagacacttgtctggagtcaagttcctgtgactgcaagctcagcctcaatttctcctacacagagtctaattttgccttatgaatttttcaatttccaagattagagaattataagattgaagttttttcatatccttgttgcaatgagagcaaatataaattagaaggtgattggaaatgaatcaggagccaaaatttatagcttctaggatgctacttaaattaaaattttaattataatgtgaatacgaatgaaaggtttattgctcattatttaaaatatttacatatttataagaaacttcatagaaggtagttgaatgttaatttttcttgtgtctttactaacctgatgactccatcatattgtgttgtagagttcataagttttaaaatgtgttaaaatccatagagacattaaggagagaaattatacccctgagaacattgaatagtcttttgaaagattgctaacagctgttgtagctagaattggctaattaatgtagtacttacagtattaaaaattcatcaatctattaatggagtatagacaatatttgatagagataataaatatgttttattatatggcaaaagggaaacaaagggaaagcctggtttgcaaacacccttctattctcacccccacaccgttgcctttgcttagcccctactaggctgtctttgcatcttacctagcatggtaacatatatacagacaacacagaggacatcaagggtgaaatattaaacaaggcagacgttggcaccatacagaacgagcctggaaaactgattctgttactggttatggctttggttatgttcctgtctacagtcttcattcattgcactattgcccgagagccccatcgtcttcacctcagtacctaagatttgaactcaccatgatccagcgatcccgcttctatgtgcatagcctgaggagatgaactaatagttgagagaaattctccatgttagtcattttttagttgcataacactgtgcacagtgggcaccacatggaaacaacctataagtctatcagtccatgcatggagaatggatgtgtaatatctatacactgggacatactctatagccacaaaaagaataaagtcttgtcccttgcaatgtcttaggtgtttcgggaattgtttcacgatatgaagtatgagaagctcctcatgatctcactcatgtggagtctaaaggagttggagttgacgtcacgggagttgagaatggagcagtggttaccagagattggtgagggcatgagaacagagggtggggaagactggccaatgggaacgaagctgcaggtcaacaggaggaagacattctggtgagctctcgcatggcaggggctctccatgcagcagttacatgctatgagtttcaagctagaataagaggtcggactgtattcaccataaagaaacactgatttcctgaggaaagatttagcctgattaaagcattacacaattgattcctgtgtaaaaacagcacctgatattctattagtatgtgtaacttttaggtttttatgtgtccattagataaaaagaaaaaattacaatagaatcgctaatacttacattacacacaagtgttgtggttgcgtcccggacacgtgttccttctcaaccatggacagcttctatcaccactgccaccataaccctcatcaccattatcaacaatataatcatcatcatagtcggtgttgtctttctgttatctaaaattaaatgacttatagtggcatctatgtgcactttcccagtagtttctaatgtttgcggtattgctcatttcctgagacgagaggcatcatctgttgacagacagagttatacacccaccaagcttgtgcagctctttgtgtgttacatgctagtgaaatagttaaaacagaggcgcatcctacttactattcttcatctagaccagacgctccattggcacctggaggcttcctttttggtaacatttaaatctctcaccagagacaaataagccatctaacgaagctttgccctataaaccaataatgagacgagagcaaatagcagcgctggccaagacacacacgtcttagctcctttgatccatcctctgggaaagcttactggcatttctctatcaaaaagtgaatggaaaatgccacctcccgacgagggaattggagcgcagacgccatacaaagacttgcatgggatgatttaagtctcacccaggtttcctgcttgcattctgtacttaaaaagatgtttgtgtgtaagtatgtgcattgtgtccattaaaaaaaaaaattcatagtggctttgtagtctcagtcctcaggaggctaaggcaagagatatgagagttcatggccagtcagggctataaaatgagaccctgtctaaaaaactaaaatgaaacaagtttatattaccatttatgtaatattttttggtggtaagagttctctgtctgttccctggtggagttggcttgtatgggaggaaagcatgaattatgctaagtatagtggcaggaggtgatagcagaaggatcactgagcccaagaattcgaggccagtatgagcacatagtgagactccccctccccaaaaaaatacaaatctaaatgtccttttgtcttccctttaccttagaggagcagacgttcatctatgcaggttgactggcataccttatattttaaaggcaacactagctagagaacacctttcttttctattgacctttgattccttcgcaggatgagctacacggctaggtgcagccacaggatgatctgtgtacgtcattgaccattcccttgttatagcttcctgagcaggctggagcacaggaggtaacactcaggatcaccttccctgtctgccagagactgcatttgtatcacagatatgaatacagatgaatctcggctcctaaacctccatgcactgggaattccaatcattttaaaaatcagattttaacaaaccttcattgagctacaagtgttactgaactgccagagtgatgactgtaggaatttaggctcggcactgactgctcaaggctctgcaaaatcctagagatttttcagatggagtctttggactgtttccctggggctgcttgtcactagaacctatctacatagccttgtgtcccttcagtcctagaatccacaaagttggggccctgagcctggtgtcctctctcaattcttgctgacctgagagagttttccctctcctgggctgtccaaggtgctggtgctgagtcttttcctgcttgtaagacaatagagctctccctgtttccggcatggccagtccctcctccctatgcggctgcgtctggaggcattcctctgtcctctttcatcagcagccttcagtgtcgtctctccatagctcagaattctagacaacaaagcatagaagtgccatggctatgggaagcctcagtttcagtcccttgaataaacctctcctggagtcttgttttcttcaagattgaatacaagaaggagacaagtatcttaatgaactatcctacaagctttgaaagatcaaaacacagagtgttggtgggttcatgagtatgtacacagagagcatttcagtggcagaaaattaactactgctaataatggctgaccctgagctggagatcttgggcatgcagccacaaggagtgggtttgctttattctgagaaccatctgtagcaatctgagtctatctaacctatgcatgcaaggcttcctgcatatgtcgagaagtttcttttttcactctgaaaaataaaatagagtaattgtatttattatttaaggggaaaaaaaagcaaccaaaactgttcccaactatagtgatgtaggcctgtagtcccagcattctggagataatccagaagaggcaggaaggacagaagttcaaggtcaccttcaatgacagctacttagcaaggcagcctggtctagagactgactcaatttaaaaatatatatatatacttctggactcatagaaacatttaataagtcaagtttatttcagcaaaccattcaaagttgtttttctcaattgagttgtttaaaaaaataagataatgttaggttacatttaaatttaaatttgattgttaaaattctttatacatgtgaagttgatagaaactcatttagtccattgtcctggctagccattgttgttgacttgacacagcctacagtcatctgagaagaaaatcctcacctaaggaactgcctgattcagtctggactgtgggcatgtctgcgagggactgccttgataatgaatctgtgtaggaggacctatcctgctgtgggtagcaccatttctctaagtaggagcctatggatgagtgagagaatgagcccaaaatcactgtccatctatggttcctgcctctagaactgccctaacctcccttaatgatgaactgtgacatggaggtgacaatcaaataaacccttttctcccttggttgctttggtggaaatgttttctcacagtagtagaaagggaattaaaacatatcttaagaaaaaccctgccgggtggttgtgacacacacttttaatcccagcactcgggaggcagaggcaggcagatctctgtgagttgagaccagcctgttctataagagcgagttccaggatagcctccaaagccacagaaaaccatgtctcaaaaaaaaaacaggaaaaaactcttgcatgttttgcatatgtgctcccattcttggggacctgaaagggaatcgacctatagaatttattccatcatccagcacatttcagtcattactaagtcattccatccccctctcactcattgcctctgaagaagccccagccacatttgggctgtgaaaaggcacatttggaaggactattttaaacctccattgatggcacgtgttgaggatggtgctggtcgtgcatggtgaagatggaatacagctactaaaatcatctccatgctaagcaaccatagtcttcaaggacgaggctgctgaagggctcatgagatacctcatgagttccaagttttgcactccaactaggccactgctttcacacttttcctattcaaaacccccttttcagtctccaagtagtgccagcaacgtgcaactttacttactgagaaaaacaccattttcctcaggttgctttcctgatcctagttctctcaagggtttgaggaatcttctcaaggcatagagaatgtatctgagcaaagtgctggactccatggaggtcaacattcaatggctccactatcctgtatcagtgaggcacaagtcagtgcaacataactcttggtacaagacaaagaagaatttgccaaataatatgacttaataaggtggcttcggattctaagagttgccaggatcaacttcagggacaaagaggaacaaagtgaaaaaagatgtagaatacttgacaaaagactccaccctccagtagtgacagagtaaagcttaattgcttcctggttattgggtgagagttgggtcaaggctggcatgtggctcacgggtagcccacatgacccccttggttccatccgtagcatgggaagaacaaaagcaacaaacaagaaagtgcaaacaaacaatcaaaaaaccacgtcagcccctcctcctgtttcctgacccttactttggaagcagacagtggtgataacggagcctcaataaatcaaaaagtctccagagttgaatttaaatcagagacaacttaatatgaaaattgtcagtttataatttgtttaaaataaataagcccagcttgaagtcaaatttatagacattctaacagagattaggggtccttacctttaaaatattccacatctttacacttgcctctatctccagaactcaagctccgaacatttcatcctatccctaggtatggcataatacccacatgcagatacacaccgtcacacacaattaaaaataataaaatcaaatcttaaaaataaaactaaaccaggttttatggctcacacctataagtccagcattgaggacttaggaaactaaagagagagattgtgatttcaagcttgacctataaagaaggaaagaaagaaagaaagaaagaaagaaagaaagaaagaaagaaagaaagaaagagaaatgaaggaaggaaggaaggaaggaagaaagaaagaaagaaagaaagaaagaaagaaagaaagagaaagaaagaaagaaaaaagaaacaaagaaaattaaaggcacaagataaatgcaacttccagggcttctactaatagcaataagtacaacaattttagcattgaaatgagtgagaacactagatgatagtacctagaattttaaaatgaatgcagaagtctatcctaatgaaataatttttacaaatgaaaaggtgattttacagtggattgccaagtaacaaatacacaagtcataataataataaaatgccagtctgcagcaacacgataaacctggccaatcaagaatcatagatgggctctgtcctattgcgggcgcccaagcctcagcccctccctcaggcttcatgaccaacaaaagaagacccttctccaggctacactcaaggtgaactactgttgaccctgaagtggtcactcctggaactatcaagtaattcaacttgacaataacctcaagctttcggtggagatattggcttgaataatgacaagtatgacaccatctgagtttaagaaaaaaaaatgtcagctacaatgacattgagcaaattaccaaaaacagccaagtcttggatttctctcgtgtgtagtgaatggatgtaaaaggctcatctcgttaaattgttgaaagaaataacctgaataaaagcacttgaaattcataaagcacaattcaaaacaagaattgtagatggaatcatattagaatagcaaatgaaatattgcagagcaactatttcctccatttaaaccagctgtgcacaaatgattaactgtagaggggaaaggtctggtcagctagagaaacgtgacacacttgccaacacacgcgaataaacttaatgtcactacctgtgggagaaaccagtatctcccggtacctgatgtaacactctgagaatgatacaatacccatgtcatgttcctgccaaaaatgtttaaccgcaatctaatcatgaggcaaaactcaagcaaatctaaatccagcactattcggcaaaggaagtagcctgggcgcttgcagactaacagtgccgcaggccatactttttaaaaggctagttagtgtagggtccaggactgactgagataaaaaaaaaaaaaaaaaaaaaaaaaaaaaaaaaaaaaaacaaggcaagcaagtatgccaagtgaaacaagaacaacaaaatgaattaagaaacagggacaaggaatgtctttgagacaggaaatcttatgtattagacaactaggccatattaatgttgtatcttgtgtgatactctgttttggttatttagagaacttgacttacagaacaaacctataatcccaactcttggcaggttgagtccagtgaatggaaagttcaaaaccagcttggccaccatagtgagttctcctcttaagaaagcgacaaagctcagacttacagaatagctgtcgaagctagcaactacagatgtcgctttgtaccagcttcatatggacatggggatgcaaacctggaccaatggagtatgttcctcacttctctctctctctctctctctctctctctctctctctctctctctctctctctctctctctctctcacacacacacacacacacacacacacacacacacacacacacacacacgagattgtacagtcttagttcctagttttgaagtgttgatgatcacagtaagtttacataataaatatgtactatcaataaaggagatcagttttaaatgtattaccaaggtaaaagaaggtaaatgggttttttcttgtgtctgttccttctagctccctcggctcccacagttcacatcatccatagtttattttaaagcaccatggaaagagacataagattttggctgtatcgtgtcatcccaccctttccttcctggttttttggtgtcagaaggtgctggggtcttaggctgaattctcctaaagacagagcagccatggcagggacttgcccacaggtgcactctaatgaggtctgcttacttcattctttcccttcaggggaatagagcagggtggtaatggcatgcaaatgagttctgagcatagactaattagagagggcccctggagagtagccagctgttggttgtgaaaggaaataaaataataggtcacagcaataagccaaatcatttcaaagctggtttcaaggcacctcttgtaggtgggaatggtaagcaaacagagggtgcaatcaagaccttcaggaaaaggaccaaagaagactggtccttctggggtggagtggagggacagtcccctggaattcatcaccaagccaaagcttgctcctcccactttgagagtctccatttataattttactctaaattcatgatttgctattcattaaaaggaaaaacaaaactgggtttcctgacttccctaggaacttctactttccctctcttcaattctctccagaactttcttcctgtctttcccttgtctcactttctctactgaccaaaacaattaggcattgccatatttggctttggtccatttctcttgaaaatctattccaagatctcagacattaaagaaataaagttgtgtgaaataaataaaaagagatcaatgatcctcagtgatcagtgatcaaaaggttcatctggctaaggaaagcttcttaacccttcccatgccagagaccctgaaataaatctgtcagatctgtgagtctttcccatcagatgtacaagttaaaatgcaaattattgtgaggaatatcaataaggttgaaaaaggttatcaaaatatgtttcagaaacaaacttctgaggtggacatgtggtcttatagcacatactcctgaaatgacaaggtaggatcaagtctcaaagtagtgatgtcatctgtcatcatgaaagttcttgataatggctgttgctgtgttgtttatacttttaatttttttcttttttttctcttattttggaagatagcagtctcactacatagcacatgctgactctgatctcccaatcctcttgcctcctaagtactgggattgtaggcatgtaccatcacgttcagcccctttttaaaatttaaaacatctttattcatttatatgacaggtccattcctccaccaaaatttttcctttcaatgtgtctatagatgaaaagaatcatgtatcgtgtatcgcttttcttttttaattttttattaatttatttttacgttccaatcccacttccccctccctcctctcctcccgctacccccactcttccccctcctccaagagagggtaaggtctcccctaggaagtctactaagtctgtcccatcatctagttgagacaggaccaaggcaactctccacccccacacccctgtgtctgagcaaggtatctctccatatagaatgggctccactaagtcagtttgtggattagtgttagatcttggactcactgcctgtggcctcatatattgccccatttgcaccattgtcacctatattaagggagtctagttcggtcttattcaggttccccatttgtcagacctgagtcagtgatctctcactagctcaggtcagctgattctgtgggtttccccatcatggtcttgactcctttgttcatattattgctcctccctcacttctattgtactcaggagtttgggccattggttagttgtggatttctgcatctgcttccatcggtttctggaagagggttttagcttctctggggttgtacattgtaggttgggtctcttttgctttatgtctggtatctacttatgagtgagtacatactgtatttgtctttctggtttggggttacctcacccgggatgtttttttctagttctgtccatttggctgcgaattttaagatgtcattgtttcttacatctgagtagtactccattgtgtaaatataccacattttctttatccattctgcagttgaggggcatctgagttgtttccaagatctggctattatgaataatattgctatgaatatagttgagcaaatttggtgtaatgtgcctcctttgggtatatgcccaacagtagtattgctgggtcttgaagtaggttgatccctaattttctgagaaatcaccatactgatttccacagtggctgtacaagtttgcactcccaccagcaatggaggagtgttccccttactctacatcctttccagcataagctgtcattggtgttttttatcatagccattctgatcagtagaaaatggaatctcagagtggatttgatttgcatttccctgatgactaaggatgtttctgccatttgagattggtctgttgagaattctccatgtatcattgggtgtattgccatgatgtaagttccaggatgtagaagggcatagataaacatttttcaaatgtgaaaaatcttgagtggttacaattgcagatggtcactgaaggacacaaagttattttgtgtacatcagtgtgtttaacagaatatgtacatgttgattttgggtaatcaaatgacttcctgtaaattttaactcagtcctgaatattcacctacatccaagtcttccagcctggaggatgttctctctttgctgacactttccttctggccttatcatgtttcatggttgctgctatttcttttagttactcaattgattccaggttcttctttggtacactattgtaatcatttaactagttacttaaatgattgatttattttggtccattatagggtctccagaaactgactgagaggcaacttttcatgactgtgtccataggacaagaatgagtgctaggttgggatacagttcagtagagagagttcaggcagagtccttgggatacatttcagtagagatcagtcagagtccttgcttgccatgtggtaaatctgggttcaatttccagaaaccaaaagacaaacaggtgccaaatctgaacccctgtcacttcttgctccctgctttacagcttttaaatcttccatcatttatctatttatttctctaatgtctttttgacattttagttcatttgtatttgtttttatttttcttgttacactttagagtgtgtatgtgtctgtctgtctgactgttttttttttgttttttttttttaattttgctttgagacaaggttttgctgtttagcaaaggctgctcttgagctagtgacccatctgcctctggctctgacttgcttgcaaagcctgatcacctgacttcagcccttggaacccacatggtgtaaggagagagctgatactgcagtttgtcctctgacctccaaacacaggatggtacatggtgtgcccacatccatgcacatgcatgtgcacacacacaccttacaaaattaaataaatattatttaagcaagaagataaattcccttgataattgatggtttctcaaggttttgttttttcttttcctttgttagtgtatattagctctaaaaattgttgggtgtctttatggcatttcttgcatgttaccttactcacctactatgagtactgtggctatgtctctgtgccaatcccactagtaacctcctccatctttcttcctcccccacctcttcttcctctgctacatcttctttcccccttacactactctttaaggattcttgcatgtgtcatctctgacacttgtgcaggaactactttaaggtataaaataggagtggccatctgcatcacacacttgcatcattcttcaggacctgtcatccttaaaggtgtttattggctaaagttccatgacgtggtccattgcaggtgtggtactgggacagtctatcaagtgggtgtgcatctttacatcccagaacaatgattgtgctagagaagatatcacaaactattaatatttttaatgtaatttgtctgtagttaaaattgatgttttcatagaattaaacttcacctttaacatttcagtcacaaatgatcccatcttcaggtcaagactagtatcagtttcttgttgttgtttgattgttttgttgtttgtttgttcctggataggagacacaaatatgaccctgtttcacatgctaaaattataggttcaatacctatatcatcttgagagtaatatgaggctgccatgttgtcagaacaaactgcctttgggaagttcatggaacacagtgatctactgctcttgaatttatagtgtgttttctgtccactgaccatgacaaataaggctccatattattaaaggtacagacttagcagtttcacaggatcctcagttgtgaactacactgatattgagaagggtgaaggctttcaacatgaagactttgtagaaaatgcagcagaccaccttagaaagctgggctttcttgtaaaatatggtggatcctcaccatccatactccttattcttgccttgcactgtgaagagtaatgtacatgacatcatgttctcaaaatatgaaaattatttttaaattatttaatatttgtacatgcatatattgtgcttggatccagcccaccccccaatcctttttcttcctctccaaatcctcccctaccccccatccacctttttctttcagcctcagcttctttctttctctctctctctctctctctctctctctctctctctctctctctctctcttcctctcagtcatcttctccctccctgtccctttaatttggtgcccaccgcatgcatttagagtttcctgtatgtgcatggttgtaggaccatttactagagcacggggaatagtctctcagggcctgatccctaaagaaaaatgactcttactctctcatcagccatcaacttccaatagctctctcagctattggaatccctgctgggattttgacttgtttgatcttgtgtaggtctagtaaacaaaatcccagcctttgtgaatgcctgtggacaactacactgtcatattcagcaatgtttgggagtgcatgggtacgacaatattgtcatatgcagcaatgtttgtgtgtgtgtgcacaactacactgtcatctccagcaatgtttttgtgtgttcacaactacactgccatgttgaggaatgcttgagagtttatatgcacaactatactgtcatatccaggaatagtgttttcctacacaaatctactccctctgactcttacaatctttctgctcctacttttgtgggaaataaaaaccatctagatatcaaaatttaataaataaaataaaaatttagacagaatcttgatgtacagctctatctgcccttgaactcatagattcacctgattctgtttcccagtgcaggagtttaaagggaggaaaattcttaatgctgtccaaacaaaagattctgctaaaatttctcccctctgtttgtacattaagggaatgctaaattttaattagagattaaggaaaataaaaatgtcaaaatccaagttcatacattagccatgaattctatcagtagattcaatgaaaagatcaccatggtttaaaatggaatgaggaatactgacttatttatatgcccagcaaaggccacatggaacagtagaaaagactggcttggcaatctacagttgtaccatcattctataaccttcatttgtgttttcagtttgatggaggatgctttaatgtttgttggatggttttgaaatgtgtgcattgtttgtcagagagcctgaaggtgcttatgatcttgagtcatttattcacactctgtctagcttctactaacagataatcagactgctcatgtggtcggaattaaaatatctaccttcagccactgtctactgcctctgtgtgttttggagtagatagcatttaaccctctctcaccttgacttcccaaacactcatttctcctgagcctggcttgcctcccctctttagtggtcccctctgaatcttctcatctgtttcacattctaccaaccagaaaaaacaggcatttctcttacatcagactttagggtagttttctgttcatcttttctacctatgtaaacatgccaaataccattttacctctttttccaagttcttttttatctctaactgagttaatccccatctttccagttgttcagattttaatgaaagaagtatatggactctttgggcagcttgtgtgcaatatgttaggtattgatccatactcctggaccacagagcatgttcctttctacacacacacacacacacacacacacacacacacacacacacacacacacacctatccaggaaaacaatcttagacataggattattttttagagtgatgtataggatgacaggggaagaacaggtcaccatgaggactgatgataaggaaatgtcatctaatgctgtgggtgtagggaaacctgaagagaaatgatgtttaaataacaaattagactgcttattgagatcactcaattgtctgtataggaattgggagttgggagtgcacatgctatgttggagtccacagagacaatcaggaaaggaggaaaaatgcaaccatggtttgcaagctcagaaaaggcatttgagtccccatgaagctgcctagaggcctgcagagtggaaacatggtacactcagtgtgagtggaaggtagcaggactgtaaggccagtggggaacctctagaaaggaagttcaaattgtgcaaagcccttgaatttattctttctgaagattagtccaaccatggaagaagatggtttggaaaaaggctcaagttcctgcaaggggaccattggtagtgactctagaactggctcagagatagcatgctgtccccgcaggaaatcagattccatgtgatctgtctgctcctcgtttacatgttcctctactcatacactgtacatttatgatctggcttctaaagtgtctgcttcgtgcctcgtattcccatttacctcattcaaacgttctgcttttctggccaaaagtgtttcaacttcctgtcccctcttctagtcatcatctggttccccatctctcccttcaagtcacatgcagggattagtccttggaaacacactcggttgctcccagacacatcaaaactcttcctctctgtccacagcctccatggtatctctaggctctaggggtacttccggtctcctcctattccattgctcacttgctcactagctcacaaatgcccagatacaccaaatgtttcccttgcccccgaatatcttctgatttactctgcaaagctcctgtgtctcagattcatatcagggccagcctcctccaattccggaagtccctaaccagagttagagttttcctctccgcccatgttccaatcaaccttcttactcaggtctaacctctcatcacagtgtgcctcctgttcaagtcagtgtgcccgggacagggtctccaccacatgtgagttcctgggaggcaaggggaactttcacagtcacttctgaactacatgttatgacttgactgtccttccctttccctattaggaaatcaagggctagcaaatgcataggtagaagtggagtgaccacattccaacaccgagaacagctggagccacatacccaaacctcagtctagctctgatagtccagattaatctattacacaagaccatttagttagcaacatttttatttctgaatatgaatgaatgaaatctcaaaagaataccagttaataactttactaagaaatgttgaattctgtgttgaaagctaaaaatcatttgataattatttatcaagtgctgattgtgtggtaaagtgtgtgtgtgtgtgtgtgtgtgtgtgtgtgtgtgtgtgttgctaaaatcaaacccatggcattgtgcacaataagtacatgatccaccactgagctccatcccagcccccagctgtgtacctgtctctgggcattcaaccatgagaaaaccagatcattgttctggaaacttttaacacatgatttcatgaggttggtgatttctccacttatagaagaatatacatttcgtaaaatggaaaccaagtattcaccctttcgtcaagattctatgtgtctacaataacaattgatggaagagggggtgtggatttgaaggagagtgtgaggggtgtatgagagggcttgggggaagcaaagggaaggaagaaaggtagttattaaaatgcaatcttagaaataaacaacaacaaaaaagaaactatgtgtcacctaaatcagtagtggaaaaagtagtttgaagggcaatgccaagacaggtgcccacagtagacatgtttccattgtattaaaaataatgaagcaaaaagatggataggatgctattgattagcatttgtctaagctgtgattattaccaccattttacatattctttatctctgacttcaatgaagctctgaacccggaagtttatcactttcttctcactgttgctttcctcatagagctgggaagtacccatagaagtgctaagccataataactactcttattgaattccaatatatatccaacattgtattagacactacagatatgaaatttttaattcatgctctcaaacagcttccgggagtagtatcttatagaaaaattggatttttccaggggaaacattaggaatatgtttccgaagaaaatactttttataggaagccctggtatactttcattttcaagactattttaaaacaatctagtggcatgtactagatttttctgaaatatgagtgaacactaaggaaaaacatcaattttcaaaaaatacctcaggttagggtagggaatatataaaaggcctttggtaaacaacataaattgttagaaaaaaaatataatcagaaaacttaaagagcactttccgtgtttctctgtatatatgtgtgaagaaaaatcaatggcttcaaatctgactagctttttttatttgtttgtttttcaaaatcttttctaagaatcgcccttgtggaaaacattcctgaaggccttaactactctgaagatgccccatttcacttaccgcttttccaaggctggatgaacttactcaacatggccaaaaaatcagttgacatagtgtcttcccattgggaccttaaccacacccacccatcagcatgtcaggtaagccacatcctctacttctgtgatggttttatatgcattatacactcttactttcctgacccccacaaagccagaccagctcagttttcaaattccaccttcccccagagctcatggacagttatgtgtttgtgcattaaggtagatgttccatcgttagtcattcgtcattcagctacacaagcaccccagtgtttctttcagggcaaaatcatgtttcatctttgtctacaagaggctctctgtagaatgctgccaagccacatggctttgaggatgccatccacatcatgacacctttcaacagcatggcctagagttcttcttcatgtagtatgtgtgcttacacttctgtctgtctgctgagacatgtatttggtcaaaatgtgttatacaattcactttcaaggcctctgagcaaacattttttaaaacaatgatgtcaaacttcccaggatagttacatatttttgactctgtcattttttgggtagacaagaaaaaggtaatttctgaatgatctaaagtaaaaatgaaaaagatccttgtaattttagtgtctttttatttatgttggtaaaactgtggtgatttgcactgaactcttatccaggtatatgatcattggcctattttaaatgtcctttatgggtcatggatcaaagtagttttgttgcttgccctacaaatcatgttagcagaacttatcattactaattatttgatgtcctgaagtctgttattcattcaattatagcactttgactattttttaagtaatgattatcagaaagtaggccaaggcaaacaaaaatcacaatggtcatactgaagtatttgagtaagtttattaaattgtgctgtgttcagtgtgttcccacttccaccatttaagcatgtctttcaggttttattgttgcataatctatcacccacaatttagtgactgggaaaacaaagatcatttgcttaggtggcttgaagtagggtttggcagccagtaacttacgtagtaattgggggatggattatctgatgccagaggatgcaggatgaatagaatacagtcatcatcccaaataagggggatgcaatgtgtggagtggctgggtctcccacagaattctttaaatggacttgagttctttatattgtggttggattcataaaagacaaaggtcagaagctcagaggcttgttaacctggggcttggcattcccgattgctgcctccatcatatttattggtttaagcaatccatacatacacaagatgagaggagacacatccaggaactgagtggaccagttggttgccatctttggaaatgatatataccacagaccactttctgaccacagcaattcattctcttccacatgcaaaatacaaaccactgaattccttgaaatgcaactgaacccatggcatgaaaggctcactgctttggatctacatgcaagcttctcttctttggaaacataggcttaaaagactgttcatatgccctaatgaccctccaaacatgccgagtcagggcaaagatgagatgatcatgggaacttgtgttcaaaaggaaagaaagaagagcacctcagtcattagtctgtggtgacgccagagccagcatagcacaaatattgagttttacaactttagaagcaggaatgtgttctaggatctaattgtggatattttgtttgttcatttgtattttgtttgtttgtttggagacagggtctctctaggtggccctggctgtcctggaacttcctctacagatcaaactggccttgaattcactgaggtccacctgcctctgcctatcaagtgctgggattcaagtcatgttgacaatatgcccagctatgatctacttctttacaagtagtttaccacctggctcatctcataaatggtgttggtctgtgtagttttctttgattgggctgggaatcgaacccagggccttgtacatgtcaggaaagtgttctgctgtggagcttcaacatcagcccttattcttttcctataagaaacagatcaagtttcctgcatgttctttgttatgatgatggattttatttactttggttttttgtgggtacagagtctcatgtagtttaggctgccctcaaacctgctgtgtagccaaggtgatcctcaatgtctggtcctcttgcctgtaaagataagtctttctgcctgcagcccaagttccgcccaccacgtggacgcccagaataacacacagagtcttatattagtttacaatgctgttggccattgactaggatttcttatatgccaactcagtcttaattatcataaatctatatattttataagacttatcttaccgaggatgccttccgctggtgtcctcttcctgggatcacatggcagctttgtagagaaaagagcaagaggaagaggaagcaccctgcttatattctgagtcagcctgctatgtcatttcatgcctggatcataagacttcttactacatttcccagaatcctcctcaactcctagtcccacctatcctgcttcctcattggccaaacagtgctttattcaacaaacaataagataaacatacacagaaggacattccccatcacttgcctttacccttcaagtgatggaattgctagcgtaagtcagtacatctattcaatactggggattaaacacagggccttgtgcatgctaggcaagcactctaccaactgagccacatcttctgcccccttttctctcttttaaagaaactatattttatttagtggagaatagtcaaacatgacagttatttctaaactaacagagcctgcaaagtgctcaaggggaccatgaacagcaaagggatgaataggaagtataacccaaagcacctatctatttattacaatgcagatgtaagcaaactatacagaggaactgtagacagtgtctggcacccagattagcagcagacagacacaaataaacatggtctatgggatctgcatatcctctagatgagaggttagcttgtaagaatgaatggtggctgttattagcagtagtgatgaattttataaaaatattgcatggagatgattagttaaaaatgtattatatatctgtccccaaagggctgctgtgtgtgtgtgtgtgtgtgtgtgtgtgggtgggtgcacatgtgtatgtttgcttgtctgtggaaggccagaggtcaacctcggcatcattccttagaaactgtacaccttgtttgtgaatacagggtttctgaatgagtcacttcaatgacgattcagctggactattgggccagtgagccccaggaattttcctttgtctgatttcccagcactggaattacaatgtgttctaccatgcccagatttccatgtgagtcttgaggattgaacataggtcatcatgtttacctaatgcatgagcatctacagagctttctccaagctccagggatgcagtttttatccccactctaaaaccccccagtttgtcctccctccatctcactagggttgttaacctttgtgtctgtttccttctgtgctttgtactgcatgaaggcccagtaaagggctagtagagcctacagtgccatggcaaccaaacctcacaattaatgaaaatgcttggtcagaaaaagagaatttctttctttctgccaggatgatgacttttaccaataggatgttaaaatttacaggacatttcaattgctaatttatggaattaaatgataagattttatgaaatcaagactttttttgggaaagccaggtcatggggctgctggaggctgatcagtagatctacctaactcatgcagtgagagtactggttcttcctgacttcactgtgaggcaccaaatggaataattaatgagctgaaacaatggaatgttgaagagatgcatttatgtgaaatcaattagatactggcctcccagagagctcccaattggcatgattgccaactgatgatacattaaaattgtttgatttggggaaatttgggttgtttttaaattacacaggatttagtggagttaatgaggagtaagagagcgcaatgatccagaaggtcgtttacaaagtgcagcttggtcctgtctccacacattaaatggttagcagatctctgaaagccggtaggatttgcctacttagcagctgtgtgacctagaccaggatataggactatctgtgcctccatttcctagcaaggtgatagcagatactgcagatgaagttagagcctgtgtgtgcttattactaccatatatatcatcgtgtacattcacccacctgtgcatacaccacaactcttgtttcagtcagtttaatactgttaaccagtaatgagttagaggcttcactctagtggaaactggatgattacctgtaaaaaggtggttacaacagtgagaccctagggagatgagggctaggtaaactatcatgctgtgtgaaattctgaccttcattttatttatttgttacaagtttttatgcatgtgcgcacatacacacacacacacacacacacacacacacacacacacacacacacacacacgtgtatgtgtgagagagagagagagcaggcacatagtctttcaccatctgtccattaagctttgactaactcactcattgaagaactcattccctatccctggtgttcaggaagtcaaggtccacctcagctttggtaaaggtctgaaatatgccccaattaacacccccaaaagcccttttcttaagaattctataagcttatgttttacctttctgttggttcatcagtcattatctggtaacgtttcttttggggagtggggatgataaggtttatttcagtttatagctccatatcatagttcattattgaagaaagccaggacaggaactcatggcaggaactgggaggcaggaactaaagtaacaggccatagaggaattctgttcactgactttatccccatggtttacacagcaggggtagtacctcttacagtgagctggatcctgctacatcaatcatcaatcaagaagaaaagatgcccccaaaagtttgtccataggctgatctggtgggaacattttcttagttaagtttcctcagttaagatagcttgtgttgatataaaattatccatcccataaagtttttagctgatgatatttttgatgcatttgatcttagaaaagtatgattttattagaaaataatctccaacttcagtctatatttgcaggattaaaatcaaaacaagccaggcttggtggcacatgcctacactctcaatgaacaggagaatggagaacttgaggccagcccatgctacatggcaaaggatgtaccctgctgtcctgactcacaaggctatgcctgtggtggctcctatctccaggagtacctggtagcttgcccattccttcctcatggtagtaatgttccagctaactcttgctgtggcttagccaatatccaagagcctttgcttcctctagcttgtaaagcttggacttgtgcttgttgcacaactgtcctatgatttattcataagtgatactgacattttctattgtaattgcttttcatatcattccataatcccccatttagtgacatcatctgtgggtctatgaactccggtacccctcgttcccagtttccatctcctcagttttccatcatcagtgactttaagcatctctccctttcatgtctgtccctactgacttcagctgttctccattccttcttcaagccttaagatgtctcttcaaccccttatatgcacagtcaggatccaatttgtaataaataactattctggaacccactactatttagtggtgttagaggttatagatttattatctcttctatctaagattttttgggggggctggcacatatttgtacatatttatgaggcactgtgatatatggattataatgatcagctcagagaaattagcatgtccatttcttccgtcatttccaaattcttctagctatattgaggtaaggaaagcactagtgttaattgtactcaccctgtgagacacagaacaatagaacttgttcctcttgccaaacaatggaatcatacctattggtgttattggtccccttatcccctatttccccaaccctattctccctccagtctctgctaaccactgtttgtattgtcaacttctatgaggtctgttttcttagacttcactaatgagggagaccatcagtgtccttatttctgtgactgacttgtctcactgaactcagtgtccttcaggcctatctacattgtcgtgatgacagtctcaagcactggggaccattagaaagctgcagaacctttgaagtgtgaggagctagagggaagtccttatatccctgagggtgtgaccccgacccttaaagaggattgtgggatgctaattttttcatcttcttctgactcatggctcatatggtgagtggcttcttcagacatgtgttcccactctgaggtgctgcctcacttggagcccaaaattaaggacccattgtttggagaagctcccaaagtaaaagccacacagataagtaaatccttgtttgcctttacattttgttataatataaaaaatgactaatataaccacagtcttttcattatggtatgtgccggtgactgcagggagccatgggggcggggcttcagcatactgtaggtatatgacttggcatttgatatacttgatatgcccagtggtttaagagctgagaccacatcaaacaaatgtcgtaatgcctctgattctaatttcctcatctataaaacaaatagaataatggctgcctcatattgtcttgtgaatttgatttaatacttatgaaacaaatgaaacagagttcaaaacactacttttgtttttcacacgtgggaccttaaatttcatggacatccaattctgaatttttgtaaagcagcaataatacctgccttcccacaaagactttagcctgtgaagaggacaagatcctacccagaatatgcactttcgacatccttcaggtttagatgaagaaaggagaaggacaaacgtgctttttcttctgcaggtccccagcccccactcctgatgtggcagtttccaaccatgactgcccagaataacctgggggccttgaaaatatatgggtgtgcctctctatctccctcccctggaacacctttacattataacacttggaaagagaccaaaaacgactagaggagtccactgggcacccaagactgagaatcactgatggaaaatgtgccagtctaataaacatggtttgattttcatgttttaggacagccctaggttggtcccttccccacctgacttgtcagcctgagttttacccatttcagcttaatcctgtgtgttacaattgttctctcagtgactagacagcagcttacatttgagtaacccatggattcctggactctggagcctgagggtatttatccctgtgtcttgattgtctagtgtatggccaagatgagcagagagctgggggttaatgtcaaaccgtaaatgcttcctgagaactaactgtcatctccagaccaaacacgatgtcagcagagtcctggtgcagtgtcggcagaagccagcttagcctaggaggaagagtgactcttgcttcaaaatagcatcttcccccagctccacaccatcaacgctcagcaaatgcttacttacgtcagcaatcttccacttaaaaaaatgtgacaacaaatgattttgaatgtgccttcattgagcagacatttatagaggaactatgctgcttgctggaaatacgaaatcaaatacacagtagtaaaacttgaaatgcaacaagggggaccctcaaaccacctataaatactcaggatttgaagaacagccacccaagaggctgcaagagaatgcgcctagaaaggcctgcctcttccctttgctgctctgcagttctcaggcccctgtggattctctcctcccccagtctattctttctggacactctctgctgcttctccatgctcctctctccccatctgttgactaattatgattatgctcttgcttgtactccagtatatttccgagggagatcattattctgatataaatgcataagtaacattcttggcaggtctttaacctgtgtgatttctcccaaagccagtaatgtaggagtcaataaatcatggctccaaaggcattcttcctaattctctgaatcaagtgaagactaagcttgtcttatatgagacccagggctttgtttgtttggttgtttgttttctcttttcccctctatgcatttcctattttacaatagctcttcttttagttcttccttccttcctccctccctctctcccttccttccttccttccttccttccttccttccttcattacttccttcactttgttatgtttgttacttttgccttgacgttttgagtggaaaccaggtctcactagctatccatagatgaccttgaatttgcggcaaccccccttcctcaactgactgagtgcaaggattatgcattaacatctgtggcttagtacttccttttttttaaaaaaaaaaaaaaaaggacaattagaatttttctcattatatctcattatttggaaatagcctcctgctataaaatatctgaaaactacagcaaactacgattgatatttcacactcacatatagactcattacacaggagacagctgcttctctggcaccaagactcacactgaaaggattccctggagaaattttaattctttgcagtctattgtttcagggtttctgatgcacctgctcctgttttacataatgtgtctcttctatgaacaatctttatttagcaaatgcatttaatattaattcggaaaatattatgccccacccatttttcccctccatactcagtgtccagaagcctttgtttcattttgtttctatttagttagtgtccgtccttaaagccttccctcatatggggtatacaggcaggagtagtgcccaatatgttgttttatctttcagcatagtggcttcatcttaatctactgctatttcagtcagcaattgcaactctccagttaccaggctgcttctctggcaaggaccctgctgctcaggccacagcctggtgggaattctgttcccacaggcactggctctgtcactgctgctaaagatagctttaactaagtctctctctatcgttctatttgtaaataaaattcaggactcaaaagctggggtgaaaacctcctagctcagagaggttgaggagtatctatctaaccttctctccttgctggcatctcccaaagagcacatccttcctcagtctcagggttcacagtgtgatcgaatatccccgacacaggaaagttgccaaatctctacatatgtgcagatacttctctctttcacccccacatgtaaagttcatgcacaggcacaacattcttggctatcatctgtccattggagggaactcagtgctgtggctgattggttccttgtcaatcagatacgagttcctgtctgagtcactttattccttccttttgccacaggcccataagaatttcaatccttgatgcccggctgctttacagagggatccaggtatttctctaccatcaaatgtgttttcagctcttcctagatttaggtctttcctagattggatagtttttttttttcctatttcttcagacttagtttatccgcttcttatttctcccagtgcattgattaactggatattccccatgcccaccagattattctccttctgtttatgtgtgtttatatgtgtgcacatatatatggacatgcatgtattcatgcacatgtgtatataaatataaatgcacatgaattctttgacatacttctagcactttgtcctcaggctgccagcttgaacctgaaccatggctctagtgtccttgggttactcatctaagttagtgctcaagtcctagtttccatcccaaccacatctcaccaacttggagaactcacactgtaatatggtccaggcttctggcttctacaccatcaggtgcccactatgtttatgtcagtcaactttccatcccttggatgcatacctataattgtcaatttataaagaccagatatttattttaactcacagtgtagaaaagtggaagctatggtcagttggctctactgtttagaagcttaaggcagatcaatactaccgagctgttggacatacaacaaaaatagaaaggggaaaggatgtctcccactcacaaagggacatcacaaagatctgaagacctctcactagtccccacctcctcatgtacccatctcctcctgtaggagatctggacagtaacacatgagactctggaggacactcaacactcaagccatggtgatgctcaaacatcatgccttttgtgttgaatccacttgcatctattgatgcttctctttatcaaaatattggtagccttttcttctttgcatttgaaaaaggtaaattggaaggacttactcacaatggtcctccattgtgataagtggagagcagtttcccatcagttccttcctctcagctccagacctggggttgctgccttggtgcctgtcttgcctcttgaagaacaaatatctctgggtcatttgagtggagtgaaaaacacccatcaggtccttcccctgcccccagactctaactctgctgctgtgggaatggattttctggaaaacactatttaaaacatcaacctttcacccaacccataaccaagttaataatacgctttgaggttatttataactgtgtactcattctgcttacgtactccgtaggcgacctgttcagagttaactgacttcaagaaaaacattatagtcattcccactacactgtggacttccaatgtaattaactcctataggctcagaggaatgcacagcctaggttgtgccatgttgtttacttttccttggtgacccattcatgcccctgactcagaacaatgtatgtacatgtgagcgagatgtggtgactgggtctaaaagcactggctggaaataatgatgcattgaaagcaacacgtgctccacacaaaatatggtgggagtgacatgtgggtatagagtgataagacctgagtgtggctttgtgtgctgttctgaatcagaagggcagaaaaacaacacagtgccttatgagaatcctgcaaaaggatgattgagacaaaagctcctcgttccttttcgttaccacatttactgtgctgtttgttgtataaagaggatggcttttgtccagggttgctttcacttcgggttttcctagactggactcttaaagaaaaaatactggcccactatctataaggatattgccaagacacgaagcaggtttttgtgtgaaaggggaaaatacaacctgaatctatgttgattcagggtgaggggtggggtgtcgatctgccccttgcagacaacacttgcttaagtggaacagagagagccatgagctccacaatgtcgatgtgccctcctacagtgaatgaagcctctagttgcctaggccctcacttaaaattcacactccaaggggaatggagaggaggctcagtggttaagagcacttgcttctcttccagagtcatgttcagttcccagcacctatgtccaacagctcacaaccacctgttactccagctccaggacatctgggatctccaattggcttccaccagcccgtgtgcatgtagcgcagtggctcacactcacacatacccaaataaacacagatgataaattgtaagaaaaaaaaatagccccacatatcaagagcagcaaaccagctgctgtgggtcaccctcccccacttccctttctttttaggccttgttaaaaggcatttgcatctgtcaattatgcatctccccatactgtctgttgggatgatgttgctcccaggctctggggtactgagaactttgagagtctgaggtgagctccacattggacaaccttcacctctactaacaggctgcaaggcaaagggtgtcttccagtacccaggggatatggacctttggctgctggccagctgcagtctagaggtgccagacacccctttgtgctgtcagctgtcacaccagttccttggagtgttaggcttttaatctttgatctttctcctccataaggaggtttttcaggaatcactgcttgggtcctcatttgcatccttctttgcatcctcatttgcatcctcatttgactctccatttgcatcctcatttgcttcttcaactcctcccaatcaccaaatcctttataaataatcattgccaaccacagatttttatcaagatagggtaagcttaatggtgcacttggggcccattaagacctaagccttattatctagctggcccctttgaaggtatttgtgtttgaggtccatacaaacaaacatgaaaagtcaataacaacagaccagttcctttttaagataagaagtgtctatctaaacccagagggaaaaaaaatactatgatattgcagcatcatctccggagataaaatcatgcctgaacccaccatcactacagtctacctgaaataaatcttacaaagattatgtgctttagagactgaagtattttgcatgtgttataaaatgtaaatatttctataatataacacctatattatatgtaatataagacatttgttctgttcagtgaaataggttttagacaagatgaagtcaacccacagtagttttgatgatctctgctgacattatagaaacctttcaaagtaagtatagtctgtattcacaaggaaggaactggagatcagtgagattaaaaagcacagtttgtaaattagaaaagcagttggtctttctgggccaaactgtagctattgaatatttttcactgcctctttatgtgcagatagctacagctttaaaagcaaaagggaaggaaatgtgtatcctgttattaaaattattattacagattgctggattgcacagcaataagacagaatgccatctacgctcctgtttctattctggtcatgaaactcagagaatttcacacatctgtgaatatctgtcatcgaagcacttgccttttacaaactgaatacataaagtttaaaaggtttatttataccaactccaaatggcaaacatttaggtttctctcttcctttgtctctgaatattcttcccagggtcaacgtctctttgagaaattgctccaactgacgtcacaaaatattgaaatcaagctggtgagcgacgtgaccgctgattcaaaggtattagaagccttgaaattaaagggtaaggccaaggttgatgctactttactgcggacattctgtgacaataccttgaatttcacttaaaataataaatcgtttctttctctttagtacatcccatttaatatgtttttagttctcctatgaccaccgcccctgattatagctcttaagtgagggaactaatgaactaatgctactgggattttgaaagtagtgttttgtatattggtttctgagaaataatctgctgaccattaaatgatatttagtcaagaagaatcagactttactgcacacatcaataatttgatcagaagaaaagagccacttcaagggaatcaagtaccaggtttccatttctctcttgccaatcaaatagaaatcctctttgagttatgtaattttcagtaagacaattgggtccagtaatcttggcagcactatgattcctgactgtaggatagataattccacagaaacatcactcacacatccattctgcagtgtgccctaacttcggccacatggagcttcattttcttttcctgcaatcctccctagctggactcccaattccaaatattttttaaatattttgtaaaatcatcttctcagcatttcctctgcaaaacggctaatgtgtagaaaagattgccacctgaaaaccagagaaaatgttcaagctgcaggaagggggcagggcaatgtcctcggtgagtctccttgtttgacccagctgcactgggtctcagctgtctgtgatttgagcagcatgcatactcgagactcttcttacatcataaagtgataatagtttctaaagtaggacagagtgacacaagtaagtaagcccaagtggcggaaaacatactgaagctgggcatggtgacaagtgcctttgattctagcactcagaggctgaggcaggcagatctctgtgagttcgaggccagcctggtctataaaatgagttccaggacagcagtactgttacacagaaaaccctgtctcaataaaataaaataaaataaaatgattgcaatagggaaataaaagaccaaaagttggatatacacgtcaacattgtatagtctgccttgcattgcttaacaaaatacctgagataacatgataagggaaaagttttacttggacagatcatttcatagtcgagcccattgtcacttgtccctattgcactgggcctttggtgaatagttaagagtggaagcaaatggcagaggaggttgttcagcttcaggggcatgatttcagtgatgtaggctcccttcctctacaccttcaggccacctaaaggctccaccccaccccaaacagcaccacaagccgaacaccaagctgtcctgacacagggctttggagaaacttaccataaaatctatcaccatgttattatgaccaatgctatcattctgttttgttttgttgtgatctttgagatagaacctcactatacagccctgcctatcctaggcttcactatgtaggccaggctgacttcaaatttgcagcagtctttctgcctgtgcccagactgctgatgttccaggcatgagctactagacctatagctgttggttttcttctgcgtgtaggaaagtttaaatataaatgaggtattgctggatctgaaaattttcaattagttttttttttcaattagctttttaaaactagacaatccccagttcagatacagtcagcatggctctggaatgtattattacttttctcatttaaaaatagattcaaattgagtccctagcatccgagtattttctatctgacacagtctttaggaagggattccctttggttaactgggggataggactgtatttgcagttttcaggatactttcctcaataaatctgcttgcatgtccttgggtgtataaatgggggaagaggagacctaagaggtaccatgtcttacttgcaaaaccttgtaaatcaaaagttaaaacaaggaggcattaggggcagagtatattgtcctggacattgctgaatgagaatcaacaaagctgttgacacggacctggtttcccttctgctgtgaactaaggtctaaactcaatgacagccattgtgtctcatagaaaaagagctgtctgaattttcaagtctatgtcttcttcataacagaagttactatcccaataggaaagcacatagtttgcttttacattggtgaagcaatagtatctgtgtgtgtctagagtgaggaatacctggattttagtaggtgcttcgtgtatatgcacaagacatataaatcttagaaatccaagtactactgatctctacccccactcctcagtagacacacattaaataataactactacatcttagaaatagcttttctgaagtcttttaaaatttgttttttagtaccttgtttaagaaagagctttaaacattttaggaagaaattagcctttcaggaaagttttttaaagttttgtccaaaaatagaggtccatacacaaaaagttataaagctatccacaaagaattgtacttgcaggaaataaagaagagaatcaaatatgctatgagaaacaagaggatgaggcttgtcaataagggataaaaagatagatagatagatagatagatagatagatagatagatagatagatagatagatgcatgactggataggtgggtgggtagatgggttgatagatggatgatggatggatggattatgggtggatggatgcatgatgggtagatgggtaggtgaatgggtggatgaatgacgcacagacagactgtatcttagttggcttatgctgctctaattaaatgccagagagtgataagtttataaagaacaaaaattattctcacaatgtgggggtctgaaacttcagcctcaaggcactcacaatggtgtctgacaagggcctcttctctacgtctaagatagagccttgttccagtctctccctgctgtgttatcatatgaaacacaatacagtggtggacatgtttttcacagaaatttcccaaaggacccacttcttattatcaccgcaagaagataaatgtctacatgtgggtttgggaggagttttatatcatggccaatagaagaatgaataaacagataggtagatagatgatagatagacagatagatagatagatagatagatacatagatacatagatacatagatacatagatagatacatagatagatacatagatagatacatagatagatgcaggagataggtcttcagatgttgctatgtggttttcaagttaatgttccaggattttcacttttctttctttttgctcatattgtcttcttaaaaataaaaacctaaggaagagggctttcactgtgttgcccatgttagccctgaattcttgagctggaacaatcctcctgctctggaatagctgcaattctaggtgtgcaccactctacctttctcaattatattaccctttgttgtgaaaacagtgcacatgtgctccagtagattctccatcaccttgacagtgctcaggctctgcatcctctgcatcatgtcatctgtaccctttgtgactaagacctcatgaagtgattcacacagatgcaatctgtggtttgaatagaaatgacatttgggacttccctcattagcaggtgcactctgtagacaaccttccctctactgctgaacaactgacagccatggggccctactgaatgctgcaacatcttcaacagcagatgttttattgatgtctacttgtgggtcataattcattgatttaagtcagaatttgatgtcatttatcttgtgtttgctttctgaaacagtctcacagtgtagctcagactggtttagaacacattgtgtggctcaggtttgcttaggactcacagtagtcatccagctccagcctcctaaatactagaattccaggcatgtgcctgactttacatcaatctttaaatgtgtccaggtggtggcggctcacatctcagcactgggaaggcaaagacaggtggatttctgtgagttcaaggccagcctggtctacagattatagagagagctgcaggacagccaggacagttacacagagaaaccctgtctcaaaaaacaaaccaagtaaacaaacaaaaaaaattaaaagtgaaacaagacaagagtcctttcaccagtaacatcatgtttaaaagttagtatgtttggctttctttttgctgtgtatttaaaaaaaaaaaaaaaaaaaaaaaaaaaaacagtgactttctgcatcttgttatcaaactccaaaggcaatcctcaccttgccttatgtgagttcaaggaacctgtactcattcatcaatgataactcattttcattttcacaaccactatatggacttaaggagacttcaagggaaaacattttatgtctgagattagagttgttcaaatttaaaattaataaaagttgccatggtttccaacttgaatattttgcaatgccttttgagccacttactccaaatgagtagagtataatttaagatactgtggtgactgtggcagtgtgtgtgacttaggtcatactgatttacaattattcctacatctaacactcaggtaggcaagcttgtctgttaactttatatcaacactgagaagtatattctggaactttccctagaggtcatgccatgttattccaacttccactgtctggaaggttgccaatgaaaagacgctcaaaagccccagtgttctcctgtcacagagaagccctattctgatggccttctacacagtgtggaatccttgagctgaagcctctgctatctcttcaatctgtcctggcagtgacccagattaaggtcaagatgtcctaatgtcacccaggcgtgattctctgccagcctttgctctcattccaccctctccaaaggtgatgtcatttgggcacatgccacagaacataaaggctggtacatgtttcatatctgaccattagcattcaaagaactctgttttctatttcccttcatagtacactgaaatatttagtagagcaggcactgctcctccttcatgtatcttacctcagagaactcatgctgtctggcaatgaccagcataacatttatacaaatgtacttttgtgccgtatgcatagatggtactggaatgatggacctgccgttactgtggagtgcaatctcaggtaaattatttttttctgagcctcagtgtccttgtcaataaaatggtgacaatagtaacttccctgaaggatatgggagttagacaaatgacattttcttgggccattggtgtaatttgtgacacattactttggtatttcatgccttggcctatactgggttcatttctgctcttacaacttacctccctagccctgtgatcttctagtgaaaacaaagtccagttctatgttttacaggacatctttgagaagaccatgggtcccctttctttatgtttgtgcaatgattctaggtaggcaccagcttgacttcaaggtgtttgctgagtcctgtgggtgtttcacaacccagactgtggccaaaacaaccctcccaaatttctattccaatttgggcttttatatcctgtctctggcacaagtaccaatggcctccaaaccattcttcccccactctacccttgctgtgtttcagtctccatataaaaggatgctactaagacagataaaattaaaaaaggaaattccctctttccttgattatctgaacatttttcatatgcttgctgttatctttagtattatacccaatcaagagcaccaatttcataagtggtatgtgagttgatttttaagggttcttttttttcatttttttaaaaatgtaaatgttttcatttactaaatattgtgataaagtcactaacatgccagacatgttatttttataaatacagggacttaaggcagtgctaagttacaaactgagtaactttacatttgacttaaatataattaagtaaataatgcataggtctgagataggattgggaataaacaacactgtgaagccaggtgtagttcacatatagttctagctttttaggagactgggacaggaagactacttgagccctgaggttcaggccattgggtagcagaaggaaacctcaactggagaataagtaagtagatagatgatagatagatagatagatagatagatagatagatagatagatagatagatagatagacagacagacagatagaatatgaaactcaaatggtggatgaaaggaatgactctacatccttcctccatccttccagctgaaccctgggctcctctgcattcctcccaagacatcccccctcttagctgtcaccacaccaccattactacctctagactttaacttaataagggcaagaaggatccttggtgttcagcatacctaggcaataaagaagtgtttgatgaaacaactcaagcctgcctatggaagagggtcttgcagctcttccatatctccccggtgtctataacactaagaatttatctatttgtaaaaggagaatgtgcactgcattaagttgccaagtttaaaatgagaagatttggaagaactgaaagattttacccaatgtaataaaaatctggggaatttcaaagggatatctttctctgtcataagagaagtccactaaaaagtgatgccctacaatgacaagttaagctggttctcagtggctgtactagttgccagatggtgggacaagcattggaatatgtaaatgctgtacacgttggcaataatgctaaagttgactgtctcccctaagtgcttgtgctaagaggcccatcttcagagtgatgctaatggcatggtggtgtagcccatcaagaggtgtggctttgtgggaggtttatgggtggcagcggcaagtgcatttaaaggggatcatgggactctggtctcttcctctgtctggcatatttcctggccagaagccccctcccccacaagtttttgctccaccacaggtttctaccatgatgtgattcttcagcacaggtccaaaatggagccatgggctagatcatcatctaggaacaactggaactgagcaaaatgacacttttcttcttacaagttatttgccttagttgcttgtgatagtcacagaaagctaacacaggtgctgatccagtggaaatacgcatggtgccttccaaagggcattagaagggttgctggaattcaaagtactttggcttgtcagtatttcttttaataagccccagtggagatcagagctgagtgcctcactttgggtatgcctttccacatggtcacttgtccaggtggatgggcagggagccttgcagtttgctgaggtgtccaacttcttcatccatgtggctaattaatggagacaggcagaggcatgaagtgattctttcctcagcagaaggttaagagcatggatgcttgattgcctctcttgcagctttttgctgacatcatttttctttgaaagaaggtttgaagctgtcttatttggccatagttaaaactgcaagagaggctgggaaatctaaggtggaggtgcaggcagctggtgaaagccttcttcctgtgtcatctcagggcagaaggcaggaatggccagggaatgccaagtctccatcaagcctataagggccttagtcccattcacaaatggctcctcatgacttaatcactttgtagtccccacttatttatactgtcaccctggccattaagctccaagcattttgaggggaccacaattaaaccactctagaagggaaatggagaagcataatcttgtagaatgattataacaagttaagctttggttcatcttcagcaaatgtcacatgcaaactaaatatatggcaaaatgtaaaataactgtgaaatgactgcattgtagcattacaaccagacagaacacacatgattgttcaatgtgtgcttgcaccacagttatgacaatttgacagaaagtttcgaggccagaggtacgtgagttgtagtggtggcattttgctagtaagtggtcatgacctcaatagaaacagacttaaagtgggatatttcttctgccaacccatcgttttccagacctgtttccctcaggttgccatagcagctgctgtgagaaaggttcacaagataattatacatgatgaggagccagtcatcccatagagaatatgctgaggaagaacagtcagcgatgcggggaaatgctcagatggtgttgctaagtgaaaagcagtcatctgcaagatggaagccaccgtgtcatttcatcttttccaggagtcactgtagagtgtcagtatgggttatctatctgtgataagattacagctgttttactctctctctctctctctctctctctctctctctctctctctctctctctctctctctctgtgtgtgtgtgtgtgtgtgtgtgtgtgtgtgtgtgtgtgtgtgttagtaatggcggtgatgaaggttgtgatgatggtggtgctgatggtgttagcaataatggtgatggtggtgatggatgttgtggtggtatgtctgttggaagtatgtcttgtgagaccaaatgctcagattctagaaaaaaagactatgttccttcctggctttgttctctggaacctgtgaaatagttagcctcttacaacttgtgtcctagtttctacagtaggctaacagtagcagctctgcagagtgctattaaagagttaattcacagaaagtgtttaatacagcacctgttaggaactttgaaacgttctcaatttttcttaaatgaggatctttagccaggtgtggtggtgcatgcctttgatctcagcacttgggaggtagatgcagaaggatctctgtgggcttgaggccagcctggtctacacagtgagttccaggacagccagcactgcatagagagaccctgactcaaaaacaacagtaacaacaacaataataataatttaaaaataatcaaaatgagcatatttataacaggaaattttctaggaagagggaaggggaaagaagaagtgtccataagggagaagaattggaaggggaagttagtccataaatgatgcctttcaatttgcaaatggtccctacagagctgagccctacagcaccaggtcagcatgtccttggggcttggggcttgaaggacaacgccacacaccccctcccttacccccattctcctgggagcttccctcacatataccttaaagggtttcttggttaaaaattccaacatataaatattggataagaatgacttaaaacttcagtgacaactaaatctttcttgctttgtgaaagacagaatctaactcatgcttcctcaggaggccaaattttccacagaaagcctgcaccttggggccgcacacagtgtgcagaacaagaggcccctgattagaggctgttacattcaataaagaggctgatgaacaaatctgttcctaaacaaagctgatgaggaggctcatgccgccttggaagctcagcctgagccactgtgtccccttgcatggctctcctgaggctgcccaggtgaggctgcttaggttcccctgcaggctatgtcatcatattactctggaagtcagtgaggtgcaggggtgcctttaaccccagctactagaccaaggcagaaggatcttttgagtgcaggtgattgaagacagcctgagcaacacagtgagacaaaacaaacaaacaaacaaaaaaacctacactaaaggctggggtctagctcaattgtagagtgattgtctagcattgcagggtcatgtgacctatttctaataccacacagcatcactcccaatggggcatggggtcaggctaactgaataaaaacaaaaaacagctcctaattttttatggggcctaaagaacaagtggggtgagtattttccctattctaaaacactccccattctagcactgactgacacatctatcgggtaaacacacacacacacacacacacacacacacacacacacacacacacacacacacgtctattaagcaggaagtataatcattccagatttgttgtaaggcttttttttaaggggcctagaaacccttttgaccattaactacaatgcaaaacagttatgggttagggaacttctgtatcacacaatatgtaaatagataggatatgatattacagtgtttgcaattaagaaacagaagccccaaggagacttcaccagagcagttaggctgtgctaagtcactcatgaacacatatatacacatacacaaaaaaaaaactctaaaagcaatctatgaccctattgtgacatttggcaaagcgtagttgttagctttcagaaagactagctagaaagcaaaggctgccactattcctgggtcctgaggaaagcttcagagtatgatgaagtcagaaagagcttctaaaacactggttctcaaccttcctagtagtgagaactttaatacagtaccttgtgttatgatggcccccaaccataaaattactttcaatgctacttcataactgtaacttagctactgttatcaatcataatgtaaatatctgatatgcatgatatcaatatgtgacgcctatgaaagggtcattcacccctgaaggggtcatgacccacaggctgagaactactgttctagaaccttcagcaagctactaaacccatccatctacccatccatccatccatccatccatctatccatccatccattcttttaaagaatatttattatgattcctgcaacattccagttgacttttgttgttctatttttagataaatctcaagagtcagacattgaggtataaacctgaaagatccacagggcttcagagaaatgatcagctgacgctgtctctccatgcttcccagattgaaagggggtggatatctttttaatcccctccttattctttcctgtgtctctctatcctaatctgggcccaccaaaacctctacagttaattctggccaggcgaatgttgaatctgccctctgattcaaggtttaactttattggtagtcttgagagtatcagagtgcaatcaaaatatcacacaacagccagtctctgttggaaattatctgaatttttaaagattaattgactgtttgtggaggatgagctagaggagaattgaggcagaggaccaagctggtagagtgtggatgaaccccaggcaggagacaaaagttccccggactaatgaggacagaaggaaataaatatattcaaaagtacatgttaggactagaactggcagaaattgtttaatatattggctatgaggatggagatgaggaaatatctcaagaatggctgtcagggcttccctatgggatgacagagtacaagctgtctacatctcctgaggtgggaagtttaataggagaaatatcttgccactcagggcagatgcaatgcgctgtctgatttagcaagctctgctttgtgtttcctacatagccaagtagcaagattgagtaggtctgatttcaagtataaagaagagtcaggatcagaaatacaggctgggaagttaccagcatctagatagtatttgtagctacagaactgggtaagactctcacttctgggacttaaaacatatggggaattaaaacacgaggcaaaactagggcaggacagaagagagaggcagtgacattggagtgtgcatatttatgccatgcccccagtatgtatatatgatggaagtgtcaagtcaaattctgctaattcatgaagttcacggtcactactgaatgagtaggttagatagtagaaaacctaattgcaagctgatgcttttaatatgttagcaatttataataaataaaaactgtctaaatcctcaagctgaaaaaaaaggctggattaaaaagttaaatcacctttttttaaagaaaaaaaacaggctggatcaatatatgtatgtacacacacatgtatacacatcccactttgtaagttttaggccacagaaaatgtgacaaaggagtggaatatgtcttacccatgatatttattacagaaaagctgataaacctatcccaatagaaaatggtgctctcttttgtcattaccagagatagagcagtcctatcatgatgattagaaagcccaggcaacaggaagctctaactatactgactttatttttttaagattttatttattgcatgtatatggatgttttgcaggcatgtacatttgcacaccagaagaagtcattggatcccatgggactacagttatagatggtcgtgagctgccatgtgggtgctgggaattgaactcaggacctctgggagagtatcgagtgcttttaaccactgaaccatctctccaggccctgtactaattttatattgagagaaagtttcaagtaatgagaaacaagagctgatagaattgaaaggaaacatgtttagacagagatctgaacactaatagaagccacgagaaaaatcaatacagagtaaaaggtttgagcagtgaataaacatggcctaagtgatgcatgcagcacttcaacaagcacacactcttccaactggaatatcctaaaaaatagacagtctaaaaatgatggcctataagcaaactcagcacatatcacagaatttaaattatgccaaatatattctctgactacagtgaaatcaagctagaaaccaatagaaaaaggataactataaaaccttgtgtagaccaggctggtctcgaactcacacagattctcctgcctctgccttccgagtgctgggattaaaggcgtgcgacaccacagcccagctattgggaccttcttcaacacccatatctcatagaagaaaagctgaagaatgagtccccaagaagaatctatctcaagaaaatcctaaaattaagaaaagaaaatcctaacctcaagaatgcagcagagaagacaaattattaaatacaatcttgaattaaatgtgcccagaaaaaaattcaaagcaaagttaatttttgaaaagaaaaaaaagagaggtggggggaagggcgcttgctgatactaggaatgggaaaaagcatcacacggaaagatcaggaattgagatacttaaaagccagtgggggcttgtaaatgtcatggaaactaagtaactgacacgggaaataatagaaaatggagtgttctccaggatggctttgagagttagaggacaatgtatgtgaggcactggactcaagtttggcctttgtctggctcctgataactgactagagtcatccaagaggaaagagtccactgaaaagtgcctacattgggtttgtctataggcatatgtgtgacggactgtcttgattggtaattgatgtagcctactggcgggggataatattcactgggtcttcaaataaggaaactgaacttgagcatgagtgaaccaactcacacaattcctgcctccaggttcttgcctcggagttcacaccctgtctctcctcaatgatgaagtgtgttctgaaagtgtaagccaaaataaccctttccttccctaagttggttttggtcatggtgtttatcacagcaacagaatgaaccagaacaccccgtggggaagtaactaatctgcatgatcaaggccactagagtctgtttgtaaatttccaggtgtcaattgtcatgtggaatacagaggctgaggcagagcccctggcacaggcaaggttatagaagaggaatggaagagtaactctcagtgtcaagaagcagctgtaccacaggcagaacatcagccatgttccttgttcattaagaaagtcacaccaacatgaagatacgtccaaaccacaccaccaggtgtctgatggcaactggaaagaatatctgaaaaggatgtgtagcatcctgttagagtccctagtgtgatgttttccagtatcttagattttcccacagatctcataatttcatttttgtttagtgatgagcagtgttctgctgtgtaaatctaccacatcttcagtatcccagtcactagttggttgaatttcagcttcttctgtttccttgctattgtgaatagaacagcaacaaacatggagatcttcattgctccatcgtatgaatccttgtcatgtgtacccagtagtggggcagctgggtcatattgaaggaaccagctccccatttcagcagccataacagctgaacacgtgcttgtttgaccttgtcttagtcactaagagatcagatgcctgcctcgtggtaaggaaccaatcagaagttagctggtggttctatgctttacggttctgggtgtgctttatggacaagcgcacagcaatgacgtgcagagcatagcaaccaccctgggagggcctatgggccataacaaccagttgaccaatcaacacagggcaagacctccaagcctggaggcacaccaatcctgagcctgtgtatacccctagaaactccccttatactgccctataagatctctatgcagccacttctagctgtcttttctagccacccaccatggcgtgtggatgaaagacccgagctaacatggggttagcttgttaaacaactataataaagcctcgtgcagtttgcatcaagctttcaaatctgcctggtgattggggtgatggaggtcctgggctgagatcctggaggcctgagctttcggggggggggggggggggcctagtcttacaatatcatagtttcatttttatcttttggagaagccctgacactgcagcagtttacattttgggccctgacacatgggttatttcttttcttcatgtttaatttcttgagttctttgtgtgttttagacatcaattctctattagctgacgaaggtttttcaccattctgtaggctacctctttgcttgatgaacgattttctttactgaatagaagctttctgtttcatgatgttccatttgtcagttgtcagcctcaattctggaatggctggaatcttgtttaaaaactccttatacctatatcttttctgttgtttatttttgagtgtgcaatttaattacaatgtttctctcttctcttccttccctctaaatcctttcacatgctcctccctggtctccctcaaactcatggccccttttcattagttatgagtgcatgcatatagtatttacatacagacacacacacatatatatagatatagatatagatatatatccctaaatatggcctgttgagcccataaacacccataacgcatacagtacgccttgccttttcctctagcgggttcagactttctggttgcctgttgagatctttgattcatctggagctgattttttttttttttttgcacagggtaagagataaagatttagtttcattcttttgcatataaatatcctattttctccccctagtttgttgaaggttctaccctttcatcaatgtgtattattattaaagatattgatgaaataaggttttcaatggtgcttacattttaaaagataaaaatgggctgtcgaggtgtctcagacagtatcggtgcctgctgccaagactgatgtcctgaactcgatccttgggagccacatgatacaatggaaggaaagaactgactcctgcaaattgtcatctgacctctgcacacatgacatggtgcacatgccttccatcttaaatgcacaaaataagtaaatcactgcaataaaaaattaatataaaaataaagattaaagctatgagatttttttgtatatgtctgattcaaatgtacttggttttggataatttaacctatgggttttgagtttcctcctgcgggcatatgcgcgcacgtgtgtgtgtgtgtgtgtgtgtgtgtgtgtgtgtgtgtgtgtgtaaataaactgatagaaagcaatttctttctattaaagaccctcatagccagcccaggaataagtaatgggacaccagtaggaattgaggcaggaatggatgcccttctgagtgaattggtgagtgtgaaagctagagaaaagtgtacctatgccagcctgagcacacgtccagccagtgggcccttgaatctgccaaattgcctggaattctttgtcccacagacctggtcttcaggcagttaaatcacctgagtcaacatagcagctaattctagaaaatcaccttacctgtcattttcctgctcatccaaataactatgctgtcaggtctgggaagttacctagaatccctccaatgagatttgcaaaagctcaattgtcacttggaaatgacatgtagtataagaagagaacattgtgttcagatgtttttcttgtgctgtttaagttttaagtatttgagttgaaaagaaattcggagacttttgatatcttataactccttgggactcttaaaaggtgaagtttttcattttcttttttcctaatatgatcaaatacttgattgcagcactgaaaaaatagctaatacaactaatattcttccctaacactttctcacattcagtttctcttttcttctgcatatgccatacacgaatatgtattattggcagatatacgccacaaatcagctcaaactaaaggaaatttagtgtaaagaactatttgcctatgattcaaaagtaaccagatactacagaaaattctgcatgttaccttacagatgaggggaagctgaggctggagttcagctgtattgggaaaggtgtttgtgacccagagggttgccgagaagtcacaggtttgcctgagctgtagctggttggtgatgattggccaactgaaaagcagcaacaaagttctatcaaagcatggtagcatgcccaaactgtgacactaacgacagcttcataggctatgttgcacatacaagtgtgtgggaatcttaagagtagtagcattcctctgagtactgttgctagaaaaaaattgtaagaaatacaatgtaagtattgactcaaatgttatatgggctgcacttacagaaggactaacattaatactattgttcatttgaaattctcctttaaccagaagctttgttttattctcctccttctggtgatcttggtctgggatgcaagcagagcacacatgagccatgaccagcacccagccagcaaagaagccaagaaaataagagctctagtcaccaccaaatgaaactgttttctttccatgccacccacagaaatatttttatttacctgtcctgcgtcatgaaatatgatagatgaaatgcattattcatgcatattttctacaggagaaaatgacacaccatctttgatatttgtacagggttgtgaaatctggtcatttctttacctaacctcctcactatttttattctccaagtatttggaaggaaaacttcgagaaataagttcaggagattctcctgagctgtaccatcctacaccacgcatgctctcttcctcacgtaatcagtaataacaacttggcactgttccttcctgcttttatctggaatatcacagctgtcaactttcagttcattgtaagctaaatttctcaatggtcttcagtctaaaggatgattcgtaaccaggaccacatttgttttaatggaggaagtgaaaagagaggaattcaaagttggaagaaatggtcaccggaaactaagactgagtcagtttagtctgacatttgccctctgccaattgtgagctgatgccccttgctcccctgccaacttgtaggaaatagtttataaagattctgtcttcagaaattgtattttattgaagagcaaaatatttcccatggtgtaattctccctttagatcactcaataatacttaaatttgattgatttaaagcataaggcttataggttaaatagggagaaatatatttccccaaggcaaaggtaattacttctgagactgagagatagtggcttacatcttgacaaaagacttttatttaaataaataaataaataaataaataaataaatagttccataaaacattagaccaaatggggaacttgtgaaaacaaatacagaatttggccacatttgtggtttctgtcagctgttgatttacatcaggtctctctgaagcatttcttataactcacctgtcttaagtaatgaagctcccttgatagtttagtaatgttatatttaatccaatacctctaaaatatgatcattgcaatgtggaatcgacataaaaataataaatcatttatgctttcttttattcatgtatacccatacatcacacatggcatggctcatgtaccacaagaattcatttctaagaatagtggaagcttcaaagtcagagacggcagcagatttggtgtctatcaggaagtcacctcctcatagatgccatgagtgtctgcttagggtgctggagaggacactgttttataagaacacaattctatttgtttgtgatcccattcagaccagagccccacccaccccagtgccttctatacctccccgagacatgttgactctggcatagtggtcatgaaaaccagaaagggttcaagttctctcttccttgtcagtggttgtttcctgaaaaattcctcttgttttctacattgacaaccgagagggaactggacaaaaccatcacagtttatactatacctgtctgggaggtgtgtgatggggtgctctaggccagaacagcccttctctgaaaggaggcaggataccaacaactttgggaacgggggtggggggttaggggggggtagcaggttcttgactttcagattattgcttgactggatttaaggtgtctccattttctttcataacacaaactcaaatgctctcattctcctcgatgcagtctcctctcctcccctcccctactctacccttctccccatataattggttctcatttcctttcatgccctgggagtatttcctacttcagagttctgagtttctcaggctgaatgaagagttgggaacttcctggttacactcctgagttttctgctgggtgtggtaaatcgacagtaatcatgaaggatttaattttagaacttgagtatttcttctgattaagtatgattaatttgtcgcatgactaggtctcagtagcttttgaagaaggtgtagctacacgtggttcttcaaaagaaattgactctatgcctccaaatgtggctaagtcagagctctcatttccctcatgggacttacactctaataaggaagacagtactcagtctcttaacacagagatctcatgatagttacctaagacgtctttccttgttgaacggccattttggagagaaaactgaagcacaggaagtcaagtgaatttctcagaggctcctagctactcagtggtaaagaggctcaaatgaagatgtctgacatgtggaccctttctcaagtctacaactagctagagatgtcttccatatttattattttctcccaaatctaccctctcacctccctctcccatcctataccattccttcccaaccaatcctttcattaggtttattggtagaatgaagaaaaatataaacagtggatgagttcaggaatatctatctatctactgctagcacctctagggaggtgcctatgtcatgctatgccaccaagattcagggagacctcagtaggccagtaaattcccaggacgcacatcttcaggtggtagattagatacacatttcctacgtccttgttttctgccccattatctgtgtccccactgactggctttagctttagcttccctgtctccacagtgactcagttctcactgactcctgggactatctcctggcattgtcctcatctcacacgtgatttctttttacccatggctacttctcagagtgtttcaatatccctggctttgccctgccatatacatatgtgtgtatatacatacataaatacatacatacatgattaataggaactgagagggctaatgggcactaggtgggttggtaagaagactgggaacaatgccaccatgaacgtagggcccttggcactgtccaacgctgtcagaaggaagcctcactcactgaatacaaggttggctggcaggatcacaggtaagaagaccttcttacttccctttctgagttgtctgagatgttgataaagaaaggaattcctatctcatttgcaacagaacacagcattcttaaaagaagaataatgttgaaactattggttctcaaaggtgggaacaattgaaatgtcaacattggggagttttatttaagtcatgttagtaagtactgtctaactgtctgatgtttccttttgttacggatttgggcttggaacggaaccagctttgaagtttaatttaagcttgcctccacacacaaaggattgttctcctaccttatttccttcacagtgctggggcctttgctgtttgttaggtctactctgatctcaatggagatcacaagtgattgcctataaccacagacagagatgagatgctcagattcatccaatccttcagcttgtctgaggtttcttttcatgtctattggactcctaaaacatgaccaccattgtgctacctcctcgagttaatgaataaagcccagacactgaaggtataccatgttttccttccttccacccctctgcttctcatccctcccccttattccttcttatgttcttttgacctttgcttaaggatgttgaatcacttttaatagttttcaagcattaccatttgtaagagtaaagttattaaaaaagattgtcacatgattctggtcatgaagtgagcagagtcctgacttcaccattaagaccttggtctgtggatgtagctaagtgtccagcgtttgtttaccacatgcaaggcagtaagtagatagaaccccaggcactggaaaaaggagaagaggagagtaggggatggaggaatttgtcagtgtagcatcaggcaagctgtatccttcccctgagaatcattcccttgtgcttgtcttagattcaaaaacaaaaaacaaaaacaaaaaaacaaaaaaaaaaaaaacagaaaatgagctaattcctccatccaagttctaaccaggcctgaccctgtttagttcctaagatcagaccaggcatgtgcagggcagcatggccataaacaacaatgagataattctctataattctttgatgtcttttttattataaagcaccatgtgaatatagtgactttagtatgacagtttgcttttagtaaacaagcttgaatggtattaaataggaatttaaaagttaaaatctaatgggtttcccttctagtaaatataatgacaatatatgtattacagttctgaccactgtttttcctagtaaaattaaatccatctaccccaaattacataggtataaaaatctttccatttgtaaatagtacttaaaatttttattagttcctggaagaatttgtcttttggttagaacagggtattttgcatttatcttcaatctttgttataacacaggtttatttgccctcagtttcctagtttttgttgttacagttaagaatcatgttaaataattcttgaaagttatcattcttgtttatccagttcactccaacagcttttgagatctctgttggcaggttatgatgtataaggtctgttttatttgttttctcatcagctgttggtgggcttttcgacttaaaatgttttatctttcaattcttattttataatttcttccattctgactttggttctctctagaactaccatgactggattatggacacagcaatagtgacttctctagttcctttggccaaaagcctgtcaaaaagaaatttaaagaaatagagacttttgggggctggtagttgcaggggacacagtctgtcatggctgggaagcgcagcctccggaaccggcggccatcttgtcacattacaccagcagtcaggaagcagcaagttaacaggaagtgaagcaggttatgaaaatttaaaaccagtcctcagtgattcacctcttaatggttctatcaacttcccacacagggccaccagctgaggaccaagtgttcatgatcctgtgggagacatttcacattcaaaacatctctgtcaaactctgccatttcttactttgtgctttggttaccatctgtttccctttataagttccctgctttggcggagtttctctttcttccctgaaactttcattgagatgtttgttgacccagatccttctgtcatgcaatggcttttcaatcatagttttaatctctctgtgtcctgtgttgtcaattattgcatcattagaacatctggggtcttgcttgtttccagggctgccaatcaaatagctgactgcttcaactgaattttaaaaattttctgatcttgagcacacctttaatcccagcactcaggaggcaaaggcaggtggatctctgagttccaggccagccaggagctgcatagtgaaaccctgttttaaaaacaaaaccaagaacaaaagcaaaaaacaaattccaatcatgtctctgtgttggctatgaaaggacaccatgattcctaactgagaagaaattaaggttcactttggctttcagtttcgtagctttaaatccagagtctttcatattctgaagcctatggtgatgagtacaggccagagctaagcttctcatctcatgatgtccaggaagcaactggaggaaagaggaaaggctcctataatacacttcaagtgcacattgttagtatttaggcatttgtactggcctgcctttctgacagggtacgtgtaccctcagctgctgccactaagagctccacctgtgcgtattcactggtcctttttaaaaggaccctgcccacctcccatccctctctctccctctctctctgcctctccctccccctctcctcccttcctttctctcttttcctttctcccactgctcctgtccccagagactggtctccccctcccctttcccctttttatgatccctttccttaattaaaaacaaaacaaaacctccacttgaactctgttgcatggtgtctttctctcttgcactgctttttaaaaattattattattattattattattattattattattattattattaaaatacacaccataatggcctcatttccttccatgggcctgacttctcagagattctatcagctcatagtagcaccacagggttgttacaataaatctttccaccaaaagccgcctgagccccacacaacatgtgagctttacgccagctgcccgcctgagttagggtcaaaatgaatacatagaaacttgtattaggtttaaagctgcttggccaatgactaggattctcatctgttagctcagtcttaattatcataaatgtatatattttagaagacttatcttattggacgccttattggcgtccctccttgccggtggatcacattgtgccactggaacaggagtggaggggaaaagggagacacttcctgtttctccttctttaaatatgagtctccttgctatgtcatttcctgcctggatcaccacttctctactacatgtcccagaatcctctttgactcctagttccgtctaacttgctgtctcattggccaaacagtattttattcaacaatcaataagataaacatacacagaacattccccatcacacagggtggtggccaacttttaccatgggagcctgggagaatgttcaaagtgccttattcttagattattcctcattattttaaaattgtgccagtgaaggcttgtttttttttttgtttgtttttgttttttttcccattcagtctgacccaggtagccatgtaactttttccccttggtgagcctctaaactgttgaagtgtcatgtggaatctaagtagaggaaccgctctcagaatcttggacacaggctgtagaggctggtcatcctggatagtaaatggcaagaggaataaagccatatggggagcagcagtgctcctcagaccctctccccagctgggtgattgaaaatgtagctatgggcttcaaggacggggaatggacaacacaagcatggattctccctaccagaccttatcgtcatctgatctaatggtgagcccctgcagtaaaggtttctgctgctctattttaagtttagaatttgtatgtttaagaataattaaaaggtattatttacaaaaaaatattttcagttcagagtggcttgttctttttaagcataatttttacttttaagcccatggtttctaaaaatcacccatttctataggtgaccttggtgatggtatatgaaataataatcaaagcgtggctttatgcaggaggaagaatatcctaattgtcagaaaaaaatatgtaggaaggaagagacaactcctaaaaattgcccttgtaagtccaaaccaggaaactaaagacagactttttttaagtagaaaatgcaatctttattttaagaacctaagtttggggtagggatggggactggggtcaaggtgggctggggtcagctctagaggggagaacagacttttatgagccacttaaaaaattcttcattgcacagagatagctttgttgactccccaaggaaggctttacccctctgaggagtggatgggggtggggaaggggagatgggggcaggagaaggaggagaaactggggttggtatgtaaaatgaaaaaattaattttttagataaaaattaatacctaaatttaaaaaacaaataaaataatatatcaaaaattcctcattgtgatttcaggatatttgaagagatgttggaactgcagtgagctcttaagtttcattgtatgcatgtgtgtgcatatatgtatatgtgcacatatacgtgtaagtgtatatgtatgtgtataaatatgtgcacatatgtgtgatacatgtgtatgtgaatgtatgtgcacacttgtgtatgtacataaatctgtgtgcatgcacatgtatgtacatatatatgtgtgtgtttgtatatgtgtgaaatatgtgccatggtgtgagtgtggaagccagagaccagccttggatgctggggctcaccctcactttgtttgaaacagggtctcccgttagcctctgcatgtcaggtgagctggcccacagcttccagggagtctcctgtctctacctcctgtcttaccacgggagcactggaattgcagacatgagatactgtgtttggctttagttgggttctgggatttcaaacttgggctgttaggcttgtgtgatgaatatcttaacctctgagccatctccaagacagggattcactctttccacaaccgaagtattaactgatacttttaatgttccctcctgtcccttactgaatgggttgaaagaggaactgtgtaattatagggacacttactctccagtgctctcctttagccttccagcctatgaatcctgagtgctgtgaaggaaattgattaagccatactaggaagcgaaatggaagcttctagggacaggccaactatgacccttttctgaagagaagatggattaataagacagagtctgccaaagacctgactctcagggaatgtctgaaagactttccagaaatctatgactgatgtgactcctgttgatacatgttgaggctagtgacaaatgtgtttttataatgctatttgagacccacatatgtgtgagaaaatatactttagaaacagtagaatgatgaacagagagttttgaatacgattgtagcaacaacaggggtacaggttcaggcacaaacacaggacttctcatccttgggattgacactgagggatgactcttgctctgaggattagtctatgctttgtgaaacacttagcaatggtcatactgtcttcctactgaatgctagtagtattcccctggcagttattattaagccagaaaatgtctgcaggcactgaaatgtgtctgccagagatgtttaataaaagagaaatgatattattatgtattgcttgatctccacatccaattctgttggcttttgtatgagtacctttgcccctggacagaactgtgaatcagtcactgtatttcatggtctcgccttctcatgggtttccctagtacagtgatggggactccttctttctgctccctctcagaatggaccacatcctggccattgtaaagagtagactgccctgctgcatgaaaactatgtgtgttgaaattctgacactgaaggcgatgactttaaaagacagcacttttaggaacttattacaccatgcacctgaagccatcttgaataagactagtgaccccagatggggttacatgcctgcagtctccacacttgggggaaactgaggcaggaggactgtgagtttgagaacagcataggctacaacctgagaccttgtcagacaagacagacagacctgagagcagctccctgaccctcctccagcgtgaggaagaagtaaggacatctatgatagagggagcaggccctctactgatgatgaatcaactgatgactggatctcaagccactcggtctctggaactataaaaaagaaaacccgggggtttataactgtctagtttacagtgctttggtgaggcagcctgcattaactgaaaacttgttagcaagcttccccaactcacatcttttatcttgacgttgacttagaacagaattctggcatacattgttcagtaaacttggtaacatcatccttttaggaatctgtaagtatcgatagagggggtagccagaagttctactaggacccatgggctccaaatgcaaactatgtaggctaaattgcaagctgaagtagctgcaagtagcaaaatgtagaaatgtttaagtagcgtggactggaaaattcaaacgggaggtctccacaatccatgtggactggggtggctccatgatctggggctggagcagacctagcaagaacagatgggaacctccgaagctaacaaacagtacacagaagataacaaactgatcctcggccaagattcaaacactgtatgaggggcaggcaatatctcagagttccaattgtttctagacaggacaaggaggttttggctggagccaggtgctacagataaaaatctgggccaggccccaaaggcaccttcattcttttacaaaacaagggaatgtcctttcttcagtgctggccattttattgctgtcaaaaaaacatatggccagtcaaagtggaatcataccccctgaagacacactaaagactttatccccaggccgctgaatgtcacctttgttgagattaatgtccctgaaaatataagtagttaaaatgaagtgtctgtggtaggattggtccaacaataagcagatagcatgtgacagggaaggcagattgaagtgctgtagccccaagctaagagtgcctggcagccaggaagaaagattctcacaggtttcagcggaagcgtggccctcctcacgctctgagtttggacttctcttggggagtttgacttggtttggtttagtctggtccgatctgatctggtctggtttggtttggtctggcaatgctgagaactgagcagcacagagcctcatgcatgccaggcacgggttccactattccactaaccccagctcaatcttggactgctaactcccagaactgagacattaagtttctactggcttaagtcactctagcatggtagccctgtggagaacaagaccatctccaagagcaagcacaaccactcacctgtgcagatgtagaggaagctgtgcccccaagccctgtgtcccctccatgcagactcaggtcatctcctgtggtgtcatggatgatgacttcctgtgctgatactcaaaattctgctgtacctgttatctcctcccctgggatctatcactcctcctcagctgttcttaggccaggatggctaaaagctaaggaccacgtggactttgcttccagagtgaaaaatgaaagaaagaactaagttgttcaaccttcaaaggacatctgttagggtgctcctgtcccttcagatgcctcttttcatccttgtctcacagagccagagggcgtggcttgtgttttccctagtgaaaggtcaagttcatggtgtaaaccactctctctcttctcaaatatccttatgcatgcaatcttatgtatttctggctatcacgaccctgaccaggaaatgagtcagtgtggtgtgtcctcattaacactgagtatctgcaggcagaatgtcttagttcattgaatacatacatgtaagtctgctcttttaagagaattgactttaatacacttaaatggccttgcatcagaacaaactaaccctgtcaatgcatttgggatggcaatacttcaagacatgacaatggattataccacattctgactaaaacaactggccacattcagctcttagagtgttttttgtttgtttatttatttatttgtttttgttttgttttcatgacagtcttagtgacagtttactgcccctggagggttccatctcattaagacccggataatcatggtttgaattaagaactattaaataaaggaccagaagtggctaaatctaaattataccatgaatatggtaattggggacataaagacaatggaaatggaaaagaatgaaataaggcatgggaaacataatccagttggtttcctactgggacaggtgcaatggtgaatgtaaaattcttttaaaaattacaaactttcattaccattattccaaaataataagaaaggagcgtggttccctcaccaaccagttagcagagggcatggggtttttgtgctgatctgggtgacttgagaagccacggtcttgtcacgatgaacagagcctccgctgcataagggcaaatccattttcatcttttagggtggagaacaaagtagcatcataagagcccccaccaccccacagccttacgcaaacctggcttccccaagtctccactgtggtcagtacagccctgggtgttggtgcttgcagatgcctgattgccagtgggtgcagggtctgggagtggaggctgactggtgcctgcttgcccttctaggagctgaggtgacatacatgaacatgaccgcctacaacaagggccggctacagtcgtccttctggattgtggacaagcagcatgtgtacatcggcagcgcgggtttggactggcgatcccttgggcaggtaatcttcccaccatatctcaactcaaaccctgtggccatcaaaatgtctgcctccagaaagcacgaggacacctgtgacatttttttttttaaatttggggtgccaaaaactaacttctgcctgctctctacaattgagacacattccctaatccaggacatttagtttaggctgtgaaacctgattacatgggaaatccaagacatagtaagactgattacactgttttcttaatgacaggttgaactttaaaaagccgagtacacaatagaacagcagtttgcatcagtctaacgtgacatgcaggcattttataaatgagctgaaaatctggcaaaagctcactctcctccgagggcaagaggtgttttcacatctcagccacaccacaaccaagatgttttcagtagcttcagctttagaagacagttacagtcagtaatctaggttggactattgttgctaataggacaagtctcacactccagctatagatgggaacactaaaagaaaacaccacaactccctggagaggaagataccatcaaagaaaacatggcttatttttatatctcttcaggaaattaaaaagtactgtctaaactattaaaaatagttccggggaggttagagcaggagcatgtgtgtgtgttgacgggaaacgattaagccaggcgatgttccccatatgggctttcttatggaaatatgtgttcctctgctgactgtaaatataatagcaagttaaactccttgtagatcagagatgggaggttttccaaaaggctaccatttacaagccagtaactgtgcttctgaatgtttttaaagatcttacttttatttttaattgtgtgtgtgtaagtgtatatgtgtgtgttagtcagtgtatagaggtgtacaaatgagtgcaggtgtcctaagcccaggaacactgaatctctcagaatgagagttatagacagttgtgagctgccagatgtgggtgctgggagcctaacttgggtcctctgtaaatgtgttgtgtggtcttaaccactgagctgtctctctagtctctgattatttcttcatttgttataacaatctaatggtagatattatctctatctacctttatggtaatcccggaaaaaaattaaaacaaaaggatcctgttcctacccgttcctcattcaaaataataaaatccactctaacctggttaggttgcgtctcacagtcttagattaacagttacaccagccaaatctgcaactttcattttattcttactgatttggagcattcctatcaatcaacccaaagtcacacttttggattttctttttttgggggggggagacagggttgttgcatttttatcttgtggcttcaaaacaaaactcaaaaacttgctcctctactcttagccgtctttgcggtgtcccacctggcacaaactgcactctagcaatggaggtggagaggagacaccatccaaaaagcaggaagggttcagtctgtcacgtgaacatttgcttccccagtagcttccctgcaccagtggccactcacccagaactcctcctcatgtgtgtctagtcctttctcaccacacctgagcacaaatactgcctcctgcctggcccatctttccagcatcactctcagtccgcgtgccatgttactgtatgtgaggggcctggtaataaccaccgaaatgtctggttcgtggttggaggaagattgttattgtggataagagagaaagtatctaaaggcatttggaagagtccagagcagagagcaaaagaagaggactgaacatggccaggattatctgcttgagaatggagcatggtgggaaagaagagtggagacagaaagaaagggaaatggtgagagcagcaggaataggagtaaaaatcttgcctatagagagcaggatctgaggctagaagggccaggaggctgctgtagaggttttcaaatgtgtaactggtacttgtgagtggggactgaggaagcctggaagcaggcatgaacttcaagatatacggataggtgccacaggtatgtcaggagaaagccatgtctgccttggcagacaaaggaaattattgatgccttttggcagaggggcacctgtttcacaagttcctgaggaaccttggtttttatctaacagccagaaatccttgtagagcccagcttgaattgaccctagactgtcgtttctggacatacgctctttctaatacctaacagttagtctacactgtgtcatcttcagtgagtgtttctctcaaccataatacatctcccaagagtcgtgttcataatcatcatcttaaatctatgccaagtaaaagcaataatagagatgctctcccaatttctatgcattgtgggctttctctgtctggctgctaagcacgtaaagaacaagaactcactctgtttcaccattctcttgcttttaattaattctgccatcaacctcattctacagaggaagagaggccataggtcagcttgaggtcatgcgacctttccaggaaatggtgaagataaaatgcaagtctatgtcctttaatactaaacttttcacttttatttgaccttgcccaccactaatttttaaaaatatgctaaacttagcaaaaaaaaatcattctcacattactttgttggggtcagaaaaatcaacaacacaattcttacaaaagtcctgtcacttccatgcaacgcaagcccttggcgatgtggtggccatgcaataaccatgcctgaagctctgcaagctccctccatctctgggttgggtttcaaagaccaggaagccctgtgtgtgtgtttacttctttctgtatccctcactgcctattgttccttcaaagactgccttagaattcctgcccacatggagtcctgtgggaagaaagagaacacctctccatacttcccacttcatgagcacctcagaaccccagggagaaaaggaaaactgcagcaggaacaaagggaacaaaaggccagccggtgagagaagctgaaaggaaagttcacagcagtcttagatgctttggaggcgtgaagtgaaatggcagaagctggggagggaaatatgaaaatcaggcttttagaaaagttacatttataatctttgaacaagcctccttagcttggagctgaaaggtgggattcaataggtccattgacatcaagaacctggcaactctggaaaagagagagatttaaatcgtgttctttaaatgtaattgcaacaaacaagaataggcctatttaaactctgaacatgcgcacattttcatcttggctactttttttgtggaaggaattaaaaagtacatgtgagaagatgagtgggctcttgggcaggcaagtgtggggacagtgagagagcagcgcctcattgaggctcctttttgtttcaaagagaaggtcagaggcagagtgctgaagctccattgagtttgcagtgctcaagagtcatggagcaggctgctctgtctttcctatttggtactagcactaagatgatgtttttcttaacatttacaagcttctgaaggcgtgctttagctccgagggaagaggtgcacctgtgatttcagtaactagttatcaagaacaaactgtaaatgaaaaggcaagaggcaattcatctgcaaatatagcagggaataattaatactccttagaaaacatttaacaaaggaaagcaaataattaactcctccttattggtttagaaattacctgtgtagctcagaaaagccgattttgtttgcatgtacattgtaaagtgaatgaggaggtgaaagtctctgcttttaataaaatatatgtattaggaggctgtgttttcaataacaaagcaatgcaaatttgctgcaatttctatagcggcaattctgcaagttatattattcaagggagcataaataaatcttttcttcttgtctcctatgggaaccattcttacatagttactgaattgtctcctgcctccatttatgtggtgatacagaggaacaagagatcatttcacctttctcctgctcttcctagcaaaagaacacttacagcatcgtttctgagtaaaacacgtttctgaacctatcttcaatgctgtgtccaccttcactttctccgtctgttctaaatgacgtggtcacctgaggtctcctaatgtggcttggcttgggatgtctgtcctggtcattttttaaaaattattttgctcactgttattattttgtgtgtgatgtatcatgtgtgccatggtgtgtgtgtgtgtgtgtgtgtgtgtgtgtgtgtgtgtgtgtgtgtaagtcagtggtcaacttcatatggtcagttctcttcttctatctttacatggaatcctgggatggaactcgattcctcaggctcacactgtcaggcagcaagaacctgtacctgcaaggctgtcttgttggcccctgatcatatttcccctagagacagtccactttgcctctcatcagtcaaactctaaactattgctaggtttcccgttcaccaatctcactgttcatgttggttgtttcctaagctgtggctctgcagtgaaacacagaggtagaattcagaatgaaactgattttttgttcttgttctcgtagctgtatggccccagcaagttgtgccacctccttgagttttcattttaccatctctacagttgaactaacaataatgtcctatgaagttgctagggaaccaaatgagttactaaaacttacctgccaccagacctgaaacatggggactgtcaaaaaactggtcattgagcagatgccaaggaaacagagttgtctaggccaatgaggaatgctggtattgatgcttatttcatgtcatcaatgatggtgccactcatctctctcacaaactcaatggccttcttaacaggatagtgtgggagcaatggcaccataagggcgtggcacattgactgtgacccactgagggctttaatgccctgccatagagctttgttttttagttattcaaaggcaatgcccagatgaggaagcaatgtgaaacaaataagaaaatagagctgaaaccatgttttggaaagtggacttcagttctcacatgaaccagacagtgctcaccagaggaagttgggggggggggcagtgtggggaatgtgatcacagtgggggaaggtttcaagctgggctctggatgtgcaaggtgtattgtatatgcttcctttatcattcttaggttggaaacaaaggcaaaaacaaaggaaactagaagtagctaatcaagctctggccaccggtgctggttgctgaaaacattggctcctggcaaggactgtggcaaccagtagagccctggctgactgctatgggttgtcggtcagagttacaactttctagacagtgctgcctttcatcagtggcaagtgtctgccgtacacaggtgacagggggctcgcttctgcctgagcattttgttcctgggtttctcttaagcatctccctcagtgttaatcccaagtctcctcccatgcctctgactatggtcagtgatgcatgttcccatggattccaggaaaacaacagcaattcacactacagcatgtgtgagcatcctgtgctcactccatcaggaaacaggaaattaaggatcttggccatggaggctggtcattcccagagctacccagcctagtcagggatacaatggggtgctgctaattaattggaaccatatttagacctttcatggagaagtatagcattggatccttcaggttcaagctcatcatggatacacagaggaggtatctatggttacatatctgaggtttttctaagtagttccacagtttgatagttccatggaaggtaaaagtaaatgggatgctatcacagcaaataacaatagtacatttgtggatttttgtataattcctttcacattcatttacctgatcctcttaaagcctatgacagcagcaagaacctttgttacagtcctagagtcacaaatgtgctgagaatcagatgctaactgactaaactaaggacatgatgccaagaagtgactataccatggcaaccgcactggtctccagcatggaaaatgaatagcctagtagcctagtgagaggcacttagactattggcttactgctccagtttttagccaatgaggcaaatgcttcctttgctcccaatgcttcctttaactcccaagcagttaatctgtgaaaaagtggccctggctctgtgtcatttgcaaagtgagattctcaataaagagactgttctaatggtggcttaccttttctagaggatgttctgtctccccaaaagaagctattcaaacctcatggcatttttctaaccaccttagacttgtacccacaaagcctccctaggttttcaaatgcccccacacaatattcagagtgtattagctttctgttactgtgaccaatacctgccataatcatctaacaaagagaaatgtttcattgtgtatttcaaattttcctaaaggcagtaaaagcagacatttgccagtacattgcccaggagggtggggatcacagcatgaaactgatatcaattgtatacatgcatgtaggggtaggaatttataccttgcaagcaggatgaggcacgtcaatggatggacagttgctaagaggagctctgggtatactaaactggcctaacagaattcttcctaaggtcaggtcaaggatttagacaagggtgtgagtggacttcgtcatgttccatgggtaaggggaatcatagttaaaatagaatatcaggattcttgctaaaaacagcctgcgaaggcctgaggccagggtcaatgagcacactgccaaaatgagggtcaagggaatgtgtttaaagtttgttcagaaggaccagtctctgagaaaaagcttattttgactcaattttattgatttaagaccatgatggattggtgctacagtggcacagaacattttagcaggaggcaaggtggcaaacaaccatgtcatggacaggaagtacaagacaggaaaaggaagacctaggggtcacacaagttcaataacatttcctcaaattcctacctgctcttcttcctataggctccacctcactcattcaattgtagtttgtttctaggaaacaaaccattgacatgtgggcctttggggagatgacatatttgaaatcacctgggagacacacctctggggggggggcgtgtttgtgggctttccagagaatttcagtggagggaggcatacctgccctgaatgtggcagcacacaccatgggctgggatcttagactgaagaaaaagaaagccagccatgagccagcattccccactgtaacagtaagtctttctgccaagccacccaagccctgctgccatgtgggcactttccaccaggctgcccaagttccacccgccaccatgttaaggtaccaaataacacacagagacttataataggtacaaatgctgcttggccaatcaactaggatttctcatctcctagcccggtcttaattatcataaatctgtatattttataagacttatcttattgaggacaccttcagatggtgccctttcttgccagtggatcacatggcgactccagagcagagactaggaggaagagaaaaagggaacgacttccttcttgcccttgctcatatatgagtctgcttgctatgacatttcctccctggatcacaagacttccttttactacatttcccagaatcctccttgactcctagtcccgcctaacttgctgcctcattggccaaacagtgctttattcaacaaccaataagaagataaacatacacagaaggatctcccccataaccccaccctcttcctgctctgtctagatttgaggggtcccaaacctgcacttccctcaccacaagctttctgattcccatgccttcttgattgtgatggactgagacttcttgaaccgtgagcaaaaataaatgccctccacaagctgctttccactgggtcacaacaatgacaaaagtaactaatacactaagtatagtgacaagaatttgtacagaaaaaaaaaaaacagaaaatcacttttactttctttacttaaccatttcacctagaccatgacagacatcacagattgttctgtctggagaatcacctaccataactgtgcttttaatttttgagtgagtcagcttgtaagtatagaacaagcaaaagtaagagagcaaatagcaagtagtgggtaagtagtagaacatagcacttacagcaaccagaagcaatattcttgtttgcccccctacacacacacacacccctcgccatggaatatacaatcctgatctctgttggaaatgatttacctccaagctactcttaaaggtacagcacttctaataccgttctcctatttgaggttctcctttctccttatcgtagtgtcaggcagccagtctgttccaggatgagaaatctcaaagacgcttggtcctgctttgttctcagagtctgctcaaaagaagcacaactagctcatgacaatttaccaacataatttatatcagacataagaatagaccaatagaaaagtagggccttgatggcagtgaacttagaatttgaaggaagagcccggctgtagaagagtagatgaaggaatagggtatgtttagactgacaccaagagaggaataaacagggtcttgagacaaaggatgatagaacactaagagggacaggatcacttttgtctctcctgtcataaagtgcagactctctaaggatacaggacataaacctatgagatgggaattctcactgatgaagagatgacagagcctgaatccctggaagaatgaaggacttgtagaactagcctagcttattcgggaacttataaataggggatccccaagtagccaacgccaacacagtgggttgaggaccagagagaatctacacatcccctcagctcttttcttttccttccttgctattctggagtctgtgttccatctgctcccccaccccaccccaaaccttcagtagaatgtcaagaacttcatctaattgccttctctccatgtcatgtgactccgagctacaaccatctgctccttgtagatattttcttactttttgaagcacttcccccacttaaaaaaaaatgctatgactagacacagtggaaacgtgtttgtttagtctcccctcctaagcatctctcttgcagatttcattggaaggggagggtttagatcaaaatatctgaattattggtgattaggtcaacctgattgatctatgcatgggacagggatggaatgcagcatgactaaatgcaggtggggaaagagactgtgttcacaatctcccgtagaggcaggtggtcaaccatacagatggatttggggaggcccatgcaatggaggggtcagttctttgtagcaggaatctggatggcaggggcaaatttagacattttaattttaagacacctacatgaaatccaagaagcaatgccatctaagcagttaagggacaagcttagtgatgaaggggacagatgtactactgtgcaagtatgctgacctcgaaccttggcaaagcactgtggcctgtccacctgccagcttcctacctcatcacaccttctagtagtctctgtaaaggtattagcaggcaggcatgggtctatcttctcttgttcactctttcctttcctttctgtttctatctctggctctacagcactctcactcatgtgcgcgagtgtgcacacacacacacacacacacacacacacacacacacagagagagagagagagagagagagagagagagagagagagagagagagagagagagagagagagagaggagagagagagagagagagagaacctcacctcatccagtctatctatgtctcattcctttttctctttcaaactttctctgatttgattgtttttactgtattaagggtacaacccagcacctagcacctgcttatcaagcaccctaccagtgacctacattcatcctcttttctctttcaagaaccaacttagagcctgctttctctgcatcccggctgtgaattttgctttaggagctcccatccatcactcatcttttcccaacctgctccatgcctctcctctccccacagccattctcttctttcttccttaaaataaatagctttgaactcccttgaacatgtaagtaaatcctatttcgcttcctcatcctaactgtgaaaggcagggagcaggatgctcacagcacctccaaggaaactgtgggcacagctcctgcagcctggccattgctctggtcctggactcctggttagagcctggaggtgccctcagctggcagcaggctgctcgcttcataaatgctggtgcatcctaatctgatctgccatcccccacatttccctcggagtaagatcccttgtcccctcttcacctctatggatggttcacagattccatatgaatctgcctctgatgattaaatccagtgaaatctcagcagagaatcaggttcaagactgtcctgtgtctaaccctcaggcaccatggctgtttgacttcttcacactgaagagcttcctctcagctctatagcaacaaacatcactaggcatctttgatcttttaagtaaatagtccatggcacaggatgaataaaggcttctaagaggcactgctttctgcgtgctattcacatggaggtgattgggaggtgtagtcatctgatgcacgatcctaattagtcttaataataaaaacctggagtggatatcgggtaaacgctgaaagatcagagaagtaaaggaccagccacagtcacctctcacctcagcaactcctcagacaaaaaacggctgagctcctgtctctgtcttgccttagtacttcctgtctgtctgtaaagatctccagatctctatggttaactagtggctagcttcaccctttgatctgtagataagtttgatttgtcaggacacaaaatatcacaacagtcatgtcctgagagtagcaacctgacataaaggaagcctatgccaggaacacagatgaggtctttggtgcaacagtggaggaccaggtacccagcgttgcccgaagtgatctagaatggcttcccggaaagacagggtctctgactttgcagttaagctctcattacataccctgtttctgcagcttctgctccagacacctctgacctgggcctcttccactttctccttgtttcccacatccctttccagctcccaggcttggcacttcctcctgttgccttaactcctgtctacatggggcatcgttcctactgtgctccccagcaccccttcagaacagtcttcctgcccccccatgataagtctttacaccaaagccacctgagtcctgcagccacaaggaagttttccgcaagccacccgagttctgcccaccacgttagggccccaaataactcacagagatttgtattagattcaaatgctgcttggccaatgactaggatttcttatctgctagctcagtcttaattatcagccataatcataagacttatggaagacgcaggcagaaagtgtcctgtcttcctggcggtcacatggtgactgcagagcagagagcaggaggaagagaaagagcaagcgacttccttcttgtccctgcttaaattctgagtctgcctgctatgtcacttcctgcctggatctctatgacatttcccagaattctccttggctcctagtctcacctgtcttactttcctattggccaacagtactttattcaacaaccaataagataaacatacacagaaggacattccccatcaccccaacacaccctagcagcttgatcacccatccttcctgatgctattacacaatttcatattcccaccctgagcccctagcttgttgaccttgaacaatggattgttggtttctcaccagtgacagggccaatataacttttgtgaggaataaaaagaatcccactcaagttctaattaggggagtttgaggagcactgaaggggcttgtagtagatgttctgataaatagttcccctccttgaatctttctgtggcccaggcaagtcttgtgttcttatcatcctcctgtcttgaagatgagacaggattttggttatggcagttcagaagatagctagtttaatccttctttgtcgcctctacagttgagttcagctcatcactggctccctgtttcttgttcaaacatcggtgcctcaaatacccaaaacagtgacaaacttgagatgctcactcaatacatgactgatagataagcatccctgtacaacatctaatgagattcctagaagtctatctcctcttctgctctcctttgctgcctgcctagcacaggcagtattaaaccagtgcagtctctgcctctctgcctttgtgttcggcccactacagattaatgtttttacttatgaggtacatttctctttgtttgacaatctacccaggatctgtgtttagaaataatttatgacaagtttcagtgtttctgtgtgtttgagcaaaataatagtcacttataaactgccttattataatcaaactgggcaccttaagtggctacctaagttacacactgttccatgtgtgtaatcatggaatattctgtgacccaggtcacagtagccagcttctcctgacatggcaatgcagttactggtcagccattgtgtcctgtggcttccctccagccctcaatcctggagatccaccagcaggtgcagacaataccttgtctgcagcagcccccagattaagctcctcggtagatcttctccgttcagtactgggtcatcacacaatggcttcaacttcacccccacacacggatatctgccgtgtcatccctgtgcccagctccttcccagctctaaattcaatttgtatccacaaacttccggcctcacaccctccaccttatcttggccttgcagataaacatgggttaaactttcctcctctctccttccctcaccatctcactatttcttcacttccttcctcaatcacttcacttcaaagctgcgccacttttcatttctctcttcccctctccttcccagtccacttctcctaagaggtaagaagtcgtcaccgtatagcctgcagacagtcacctcactttggggtatgctagagtatggtgtcagccatctgctctgggaccgatgagccttgtgatttgatgcttctggcttctttttgttactaattccaatcttgattcagagatcatatctctaaattgcgtcacctcccagcactccaggagccctcctcatcatgacacacaacattctcctcggtttcactcccatccatcaaaagctcttccagtaatttccatggtcccacccagcagccaactgacattattgactgttctcttaattagacttagacttctcatctctgtgtctttgttcctacttggtgccatctttaacccattacatactcaaagatgtaaaacggtgagatagatacaaagattaatttatactgtctaaaaaggaaagaaaactatgatataagagtggtaaaatgaatatcaccatatttacttaaaacatgttcgggcatcaaacactgtatgttcaagcatcaaacactgtatgttcaggacatagttaatgaaaaactcaattttcataattgtatgtatggaaggatatctgaatgtataatgatattagtattgtacttctcacttaacaatgcacgtctacaaataacaacaaaagctagtgtaagcttgaatagatgcaagttgtggtgtgtgtgtgtgtgtgtgtgtgtgtgtgtgtgtgtgtgtgtgtaagtcagaaaacaatttcgacatctcagtgacctcttggtgtcatcattcctgatgcactggccatcatcatttttttttttttgaggcagggtcttcagagttcagttgttttatgtatgaaaagcctacggccattatcatctcggttctctcattttcatcctcatgtttggggcattgttcacatcttcatcttcaggaggcagatagtaagaaggctgttagtgcacacagcagagaacaaaagtgacacactcctaagagtgtgattcttggcctgggtgacctcactaacccgtactcttacctcccaggctcctggacatgtctaagtggggaaaaagaggttatgattgaacactgaaccaaccaactaatcatgtttacctggatacatctggggaattagcctgcagaaaatcactaatcagagtattagaaggtcttgcatgtgtaattttttatatgcacaaagcagagaaaagaaatttttacttgaaaatgttaagaaaagaaactacccacctgtcacgctctatcacagcctgtcacaaggcttccttttaataatattggggggggctgggggtgcctcaactaacatgtggaaagagaatagatttttaatgagaattcaaactgtttgtgtgtccatgaaaaaaattatgcagcctttgaaaccctgttttctgatctgtaaaataggggttctattatcttacaggtttctgtggaaagtatatggaaattaaatgaagaaatgtcaaggatgcttagtaatttctcagtagctacttctcttcctcatgggaattcacaaaatacattatttttctcatacttcctctatgttgccttctatggtagctgacaatggagctataatttttcagctttttcctgtgaaggagatgatactattattttctatttcccatagaatacaaaatagcctctagccctcaatatatgaccaataaacaggttaaggttgagttgatttttttatcaattgagttatccattacagataactgccaggcaattgcctagttctctcctccatccttggggctgctgtgtgggtaatgaacaggcactgtcaccaggcacctatttctggttgatcactgggagcagctctgacagatgctggcttcacaacactcatcagggagccacaggggtcctgggtcttctggaacattgtcaacatcacaagctgggaagattttttatcctttccaagaaacttttttaaaagaagaaaaataaaatctcaagttaaatttaaaccaacaacctttaaaaaaattagtcaagtgacttcttccttttcactttgttttagtgacataatgagtataaatggaaaatgggtgcgttaaagttctatttaagagactgagagccccatggagagtatgagtctgacttaatgacaaataatcagcttcctgtctatagtctctgtatgccgcaggcaagccttgtggtgctttctttttgtatctggctgtctagaaaagagccctcaaattaaaattataaaaagaacatatattagtcacgttattaatgttctccaaaataacatatgtgtgtaatcattctcttctagaagtttctagtcggatgcattgatgatgacttttaccaagcttcattctctcttactctttagcttcacaattttggaagccctgggcctgtggtaggaaatactacattgcttgggtcagtggcagtgtgaactgatttgatgtcatgaggccagccagaatgtgctctcacctgtttcagaaacatactgtaatgaatgtatgtgcgtctgcttggatcctatataacatgaacatagacaataaggtcttgtaagtcatcactgccaaggtcttcagctcattgtcttaggagatgggttctacctcaagctaccattcttaagaattcagctatgaggagagaagaagtgggaattggggacagaagactttggattgtctggaaatcctggtggtccaccccagacctgattcttagatgacatctcaagggtgtgtttccttgccccacactaaacaaactttttgttttagtgtgttttttatttgaattagaaacaagattgttttacatgtcaatcccagttccctctccctcccttcctccctggcaacccctccccaactaaaaccctacctatcatatatcctttctgctccccctggagagtgaggccttccatagggtgtcatcagagtctatcatgtcctttgggatagggcctaggcccacccccgtgtgtcttggctcagggagtatccctctatgtggaatgggctctcaaagtccacacctatgctagggataagtactgaactatactacaggaggtcctgcagatttccgaggtttcctcactgaaacccatgttcctgaagtctggatcagtcccatgctggtatcccaggtatcagtctggagagcaagagctccccaatgttcaggtcagctgtttctgtgggtttcaccagcctggtctggacccctttgctcatcactcgtccgtctctgcaactggattccagttcagttcagtgattagttgtgggtgtctgcttctacttccaccagctgctggatgggggctattgggtggcatataagtcagtcatcaatctcattatcaggggagggcatttaaggtagcctctcctctgttgcttagattgttacctggtgtcatctttgtagatctccagacctttctctagtgcctgatttctctgtaaccctaaaatgtctccctctattatggtatctccattcttgttttcttctattcttcccccaactcaacctttatgctcgctcatgtcgtcctcacctctcctcttctccccttctcattctcctagctccctcccccttttccgtgctcccaatcttgaccctttgcccttctccaggggaccatgtatgtctctcttagggtcctccttgtttactagcttctctggcagtgtggattgtaggctgctaatcctttactctatgtctaaaatctgcatatgagtgagtacataccatgtttgtctttttgtgattgggttacctcaatcagaatggtttcttctatttccatccattttcctgtaaatttcaagattccattgtttttttccactgagtagtactccattgtgtaaatgtaccacattttctctatccattcttcagttgaggagcatctagactgcttccaggttctggctattacaaatagtgctgctatgaacatagttgaacagatgcccttgttgtgggaatgtgcttcttttgggtatatgcctaagagtggaattgctgtgtcttgtggtagactgattcccattttcttgaggagtagccatacttatttccaaagtggctgtacaagttggcactcccaccagcagtggaggagtgttcccctttctccacatcctctccagcataaactgtcattggtgttttgggttttagccattctgagttgttttgatttgcatttccctgatggctaaggatgttgaacactttcttatgtgtctttcagccattttacattcctctattgagaactgtctatttagttctgtatcccactttttaattggattgcttggtgttttggagactagcttcttgagttctttgtatattttggagatcagccctctgtcagatgtggggttggtgaatatcttttcccagtctgtgggctgtcgttttgtcttgctgactgtgtcctttgcattacagaagcttctcagtttcaggaggtcccatttatcaattgttgatctcagtgtctatgctactggtgtaatgttcaggaatcaatctcctgtaccaattaattcaagtttatttcccactttgtcttctaataggttcagtgtggctgggtttatgttgaggtttttgatccattaagacttaagttttgtgcatggtgatagacttggaactatctgcagtcttctacatgccagcatccagttatgctagcaccatttgtcaaagatgttctctttattccattgtataaatttagcttgttttcaagaatgaagtgttcgtagttgtgtgcacactaaacaatcttgtcttccatgcccagcctactccatcttaacattctccttttctctgctatcgtagtgaatggtgaacacaaatttcctcaaagtcaaatgatgatgtatagatgtaccagaccacacacttaggcaccctaagacattgtagcagacccatagaggaactgtgggccacttcaaatctctaaagcaagtacagtaaaaaaaaattattgctgtatttggtcaccctagaattcttgaattaatccaccattttagttgcctcaagaaagcctcatatcaataattggtggtagaaattacaatcttcattttcacagctaaacaatgattaagataatctaccctgaaaagcacatggtaggccagtctgttctagaaaacactttctctgtattaatcagaatcatcatcagccaaatgaaacactgtatttcaagctttgttttgagagaagcaattattcataaattggaaagaagattagatagaccgcaggtgacccagaaagcttaaaagtcaaatttgactttttccttttgaagcagtggctgtcaactatgggtcacgaccctctgagggtcaaacaagcctttcacgggtttgcctaaaacacaggtatttacattatgttccacaataggtagcaaaattacagttctgatgtagcaacaaagataatgttatggttgggaatcaccacaacatgaggaactgtattcaagggttgcggcattaggaaggttgagaaccactgttttgaggccatgaaaagccattaatggtgtttgatactgactttttgaatggcatatttttttatttttatttttatttttgatgaatggcatattttgagagctgacattaaaaacagtgtgaggaggactaagcagtcattgatgctttaaagtccctcattttgaagcatcttcaagaatagtattggactctgtggtagaagacaatgcctgctccctgaagcggtgttccacaatagactcaagaaacccgggcatgctgttttacattttctacataccaaaaagaatttaaatactaaataattaaggcagtaagataactctgagggtaaaagtacttgatccacaagcctgacaacctgagtttgatccctacaattcacatactggtgggaggagaaagccaaagccacaaacttgtcctctgagctccacacatgcaacatggtacacatggcccccaacatcagccataacacatgcactaataataataaaattaaaggttaagagtaattaatattttatttaacccaacatcaaaatattagcattttagatgtaatcaatatgaacactttgtttgacatttctaattctaaatccagtgtgcattttatacttacaagtacttctcagcgcacattaggcccattttaagtgcttagtagccacaagtggcttcttgttgccacatgagagagagcaactctacagcttgactctgcaagtgtgatctatagaccaccaccatagtggtgtcattggttacatcctaaaaatgcaaaattctcacacccctctcgggctgacctattgaaccttcatctatatgttaatggcattgtttgggtgggtatattaaagtttgagaatcaccttctgctagagcagtagttctcaaccttcttaatgctgcaaccctttaatacagttcctcattgtcttaggatttctattgctgtgaagagacaccaggaccatagcaactcttcagatagagaaatctgaattctaataaccctactaggtaactctggtatcactattctgggctggagagttgtctcagtggttaagagactgttcttccagaggacccagcacccactcagcagctcacagccatgtctaacaccagtcccagtggattcaatgtctggactctatgggcatcagacacacacctgatatacagatatcaatgcagaccagacacccatgtgcataaaaataaataagtttttaaattatttttaatggacacctttccttggtgaagctagagtttgcctgtggtccttatattttgagatagtttgattcttcataatgaattacatttcttagagaacaaatggaggattacatccattagagaaaaaaggagaagactagttgtgaagggggcaccagccagagaaagtgggggggggcaagaaagggcaatgggagaggagaacagatgaggatagagtgtaagggctcatacggatgaagatgctgggccgagacccattaccttatctgctaatctttaatctctaacctaacttttaattggacagagggacaagaatggtttctcactaccattattcaggcacatataaactcactgatttcacagggagaggaataaaagtgaccaattgtacgctatgatctcatagatagatagatagatagatagatagatagatagatagatagatagatttcattaacctactgataccatttcctatgagaatttctcaccagtaaaagctaccctttgctcagcatctccatgtcttgggccccatgtctgatattttgcacctatttcctctgactccctttcccactcttagtatggtaggtagggacaccacctccaggtcagtctgatgccaaagccagtgttacatagcacttactccctgccttagccttgccttttttaaatcatttaaactggaagctacattgtatgaggttccagtgagtatgcactgaatgttcatggcatttaaaatactaagaggagctctccggttacctgtatgagctgctcccccgcccccacccatactcaacctgtgcagggtagaaccacttcaggttagaacccttagcccagggccacccagcacagatgacagacaccccaggggaatacctcatgcactgtattcacagtgggacagcagtggggtattatgagggagtaagaatggggcagaaggcatccaggcatttgttgcctaaggaggattgctcaatcacagacatcgtttcaaattgctgcaaggtaagcaaatggattattttcagtttaaatatctttaatttccctgcagacatgcattctcttactgtcatcctagccaaggcaaactgcttcattctgccctcttcatccattcttctgcttccttagagaagaccatggaggtggggacttcctaaatgtctacattgatgcattcctcaaatatgaagtgttctgctgatggggcttttgaaatcaactctaaaccaggtgtggtggctcacacttgtaatcctaacactagggaaacagaggtgggggctggggcaggacattgtcacctgcatactgaatctgagatcacgagttctgaactgtataagagcctgtgtcccctgactctcaatcaaaaacaaaaaggcagggcctgaaagatggctcggctagcacagtgcctgccactcaagctcacagacctcagttcagctccccagcatctagcatccatttaaaagcagaacatggcagtgagtatctgtaacctccatgcccaggggaagatgcaggcacaagtagaaccccagaacttgctgccagccagtctggccaatcagtaagctccaggctcaatgagataccctgtttcaaaaagtacagtaaaaggtgaccaaggagaccctgacaccaacctctacacacacacacacacacacacacacacacacacacacacacacacaaaagaagaagaagaagaaaagaataaaaagaaggaaagaaacaccatggagaaatctacccataaatgtcttcatgagagaatatgctcacttgcccctctctcacttgcctttgtggctcacctaacagtggccgcttgtggggttatccagagcaattgtgtgaacatttaaatgcaactgctgagatattctcttcagagtcccttgactatccagctctcaatgccagatgtaatggaagctaaggagagccctgacactgtctcaattcttgcagtcccacagtctcttttcactggcaaaccatttttctaaaccataaaatgtgtgtctcctttctccacttgcagagaggtcagtggccttgtgatgggacccaattcagaacttgttttcccggagccagccatcatttttgtttctttctgtaacagcacaaattctacgacatggcagcagattgtagttctggggaaatgatgttgtgatttgagtgttaattaatgcattcatagctggcagcaaaatatgaacatcctgctcactaaacagaactgtggaaatggaaccttcttgtcttccttgaaaacttatgcttgatgaaagtcagggaaaatcagcagcaaagtagttatagagaagtctctgcaaagaaaatgatggccctggaatgagttcatcgagaaagagtcccattctacaggtttcatttcactccaggacacagtattggaccttatagatgggaaagatgcagggaccctgtacgaggacttagggaaagagactattctgcctccaactgggttggggaagctgaaacataggttatacgagagcatctacaatacctatggaaaagtggactagttagtggtccaaagtgaatgagcattgcttaactgtagcagggacaatcacagcagcagcccagcatacagagaggcatgaagatggcctttaacctggaggctagctcataatgttgggcagcttaaggaattcatttgtgcttaatcaggtcattttactagaggcaaataactgactggaatttcttctgaaaggtgggcagtgcttcaggagcaaagacatgcctactcaggtcccacccagggcttagcattggggctaatctttgttctaggctctcctttggtctctcccattcccttgagtttgccactgtcttagttggggatttttattgctgtgaagagacaccatgcccatggcaactcttataaaatatttaattggggtggcttgcctatagtttcaaaggttcagtccattatcatcatgatgtggagcatggtggcatgcaggcaaatgtggtgctggagtagctgagagttctttaccttgtagtcaacaggaagttaactgcctgtcacactgagggaagcgtaaacaaaacagacctcaaagcccacccctacagtgatacacttcctccaacaagaccactccttctaatagtaccactcctttgggggccatttttttcaaaccaccaaatctactccctggcccccgacattttatagctatatcataatgcaaaaagtgcattcagaccaactttaaaagtcccaaaagtctatcacagtctcaaacttgattcaagtctcttctaagatgcagggaaagctcttaactgtaatcctcctgtaaaaatcaaaatcaaaaagcagatcacatacttccaatataaaatggcacaggatatacattaccattccaaatcgccatcttggaaggtgcagtaactcacaacccaatccgtttgtgctgacacctccttctcaagcactttagtgctgggtgacgaaatgatgagggaaatatctgcatggtaatttcataggagtcctccttctacaggcttcccgtggttctggaatctggataccaacagaagagtccaggatgcttcttaaaaaaaaatagttacagattttaagggcaagtgtgcggttatcaggagttttctttcagtctgcaaagaggaagctagttaaggtggacttgggaaatataatttaaagacacttaaccaggatagttctctgggttttaagagctactaatgtctggaggagaaggatgtgtatcttgaagagacttgtggtattactctgagctgatttggagggagttaaatcacctccagccatggggcgtgtgtgagattcttgatgacttgtggttggggctgacattcattaaggcctccctgctttttgtctttatggggaacagaggcccagaagctcagcttataaaacgaaattaattcacaactgttatggatgatctgtgtggatgagcgaagcttgatatatggaacaaactaagagaaatgctagtttaatgtttaaaagacatatttcatacccagcatccaagtggctacagacgcagctctccaacagctgtgcagcagcagattgccgttttaatgaaccaataactcattcttaaccagcctccttcgcacaccagtggtggtattcaaatcacattggtgtgtttaggttgctctgctgtcccaggctccctcaacatcccctctcgtcactattaaatgtagttccagtttaatccttacaatttctttttctgttgttcactgaagctttaaaaaaaatattggctttattttttgaaattatactataatcccatcatttcccccttctctttccttcctccatgctgtatccatatgacccagcacgtgaatgaaaaactaaagaaataaaaaaaggaaaaggaaacatgactgctcctaggtgtggtggaggaagagagttattgtggataaaggggagagcatagccagagccagagatatctaggagagtccagagtgaacgtgaccccgagctgggccatggggggaggagaagagagaggggaaccaggtgcagcagcggggagaccccaatggttgggttatatagaagagagcagcccagcccccggactggtgaatttagggcagagagcaggatatgccagctaggagggccctgtaacaggtaggggctaagggatgcagggagaatctagcatccaggtctgctttgacatgttaaatagtcatctcagtcaaaacctagtgtgtgagtgtgtgcgtgtgtgtgtgtgtgtgtgtgtgtgtgtgtgtgtgtgtgtgtctgtgtgtctgtgtgtctgtgtgtctgtgtgtttcttaccttcacagtctatataataacgtcactttcctggggtagactattcctcccactctatttcttagttgatttttgtgtagggttgaggcctaatgagccttcttccatccatgtcagtaaaatcattgtaactttaaatttacagtgttaaaagctagcagggaattcccagttcctctttgaacatggacttgagaatacgcttacattttaaccacatgtttctgtcatcttaatcttccaaacagtggtctcagcactgaggttccagggtgttccttttaccatctttgaaattcttagcaaaacacctcactaagtgaaaatccaaaacctgaaattcttcaaaggcttattcacatatctggggtagcataatgacatgaaaatgtatttgttggtcaattaatgtattctttgtgttccatctaatgctttccttaaagacccttgtttagttgtacagtacaataacatgagtagacacactgttacaggactattcacatagctggaaatgtagatcaattggcagagtgcttgtctagtacgaagaaaattgtaggttgctctgcagcagtgcataaaccagcatggtggattacatttggactacatgagaacttgtctcgtgtgcatgcatgtgtttctattcccaaatacgtaaatacaacttaactacataaaccacacacacacacacacacacacacacacacacacacacacacacacacacccctcagagtgaagactgattgcctcgttgccactgggcacttgtttctttgctttcacaaatactagagattctggatccatcagtttacctctgtaaatgcctccccagtatgttttattactcagcctggtgaagcagtacctccttctcaagcaagcatcccacgctcacatacacaaattcctgtggcttttacctccttgtcctcagcagtgactgagtagacaattgcagcaacattccgacccagaggtaaattgcagatcgatgcaaaggcgtgagccacctgcctactatgcaagaccggctgttctgtttgttttcatcccagccagagtgaaactctcaaactgatctcacacaggtagtccataccatacccattggtgtgtttaatgaacctgcagtttggagtcagtcgctgcactgttctgtgacttggttgcctcctttgcaaaaataggaatgaaaaactggtaccaaccttattggggctaagaggatttacagagatccatgtgaactttgccgggggttgttaaaatctgtgttagaactgtttcatttgtcactacaaatggcactggactggactggactggggctacccaggaggccactctggccaggtgagatagctgctctgtcccctgaatttgcttctcatcctcaaaaggatactagaaaatccagtgcctgtggctctaagatagagatcattgcaaactacttttttatttttttagatatttttcttattagttcaaattaggaacaaacttgcttcacatgtcaatccctcccctccccccagccatcctccccagccccccacctactccccaccccatccaccctccactccccaggcaggtagggcccttgatggtggctccccaaagtctaccacatcatcctgggccaggcctaggccctcccccatgtgttcaggccaagagtgcatcccttcacgtgggatgggctctcaaagtcccttacaccagggaaaaatactaatccactaccagtggccacatagaatgcagaggcctcctaattgacatccaatttcaggggtctggatcagtcctgtactggcctcccagacagcagtctggggtccatgtgctcccccttgttcagtccagctgtttctgtgggtttccccagcctggtaccaacccctttgatcttcattcctccctctctgcaactaggttccagagttcagttcagtgtatatctgtgggtgtctgcctctgcttccatcagccactggatgagggctcatgtttgtctttttgtgactgggttacctcactcaggaacatatctaaacatgataaaaagcaatatacaccaaaccaacagccaacatcaaactaaatggagagaaactcaaagcgttccctctaaaatcaggaacaagacaaggctgtccatgctctccatatctcttcaaaattgtacttgaagttctagctggagcaataagacaagaaaaagggatcaaagggatacaaattggaaaggaagaagtcaaactctcactatttgcagatgatatgatagtctacataagtgacccgaaaaactctaccagggaactcctacagctgataaacaccttcagcaaggtagcaggatacaaaattaactcaaaaaaatcaatagccctactatatacagatgataaatgcaatgaaaaagaaatcagagaaacatcacccttcacaatatccacaagcaacataaaatatcttgaggtaacactaaccaaaaaagtgaaagacctgtacagtaagaactttgatactttaaagaaagaaattaaagaagataccagaaaatggaaagatctcccatgctcttggataggtagaatcaacatagtaaaatggcaatcttgccaaaatcccaacacagttcttcgcagaccttgaaagaacaatactcaactttatatggaaaaaaaaaaaaaaaacaggatagccaaagcaactctgtaccttgcaaactactttataaaaccaaaaataccatttagtctctgaccttttgaaaccaagaagcccctgcattggaaagggcatatcatcggagttaagagaaggcccatagaatgagaggtatttgcaggttatttattggacagggaatggatatgaagaatatatgatgcattcaagagctaatcaccaaaacaagcccaaaaaatttagtttttagtggaataaagatcataacagaggtctttcaaaaatacacacaagcacccaaggtgtatgaaaaaatgttcactctcacaaattagcagagaaatgcaaattaaatataggacaagatagactctcaccacagaacaagtgttatcagatagacaaatgataaacgctgtggaggtaatgaagaacgggagatttcttttataaggatggtagggaggtgagtagcagcaccatcacaggaagccgtatagagatgcctcaaaaactaaaaacaaaatccaataggatccaacaattctactactgggtacatagaagatgaaatcgctctatcagagactcctgctgatatgtttttattagctacagttaaaggtatgaagtcaacctaaatgcctgctcttcagtggatgagtggatggatgattttaaacatgtggtatgtacatatgcacaccggctattattcagaggtgaacacgcacatacacacacacacacagacacacacacacacacacacactgaaatcctttcatgtttagcaacaaggatggatctggaggtcttcaggtgaacgaagccagttacagaaaggcaaggatcacatggaaaccggagcctcagtctggaaagaacagacaggcagagcgaggccagagactaagagaggcaatgggaattgacagttgataaagggcagccggtgagaggggaggaactggttcaggttttctacagcacaaaaggttacaacaatcgatgatgtgctacacaatgacaagaaaaagaaagtacgaaaagccaaacacacaaaaacgatggcatgctgacagaggggagagagctttttctcttcagtttgatttatcgtgaattggatgcacgtgccaattctccatgatgcacataactgtgtaaatactttctctatttaaaaggcaactgtagtaaataaaaaggtggaaaaatcatccggtcagtaatttctgtatctttcccgatatggtctcttttaattgtcttggagtttagggggtctgggttcaattcttgcttctatgctagagataaagcagttaaatgtgcagcctgtgggcagtagtgaacagaggccagtgtgctttagaacagcatttgtctttcaatcacctacctaagtataggaaggatctaagggtgccttgtttttctggtcgtttccttccacttgtgaggcttcgaaagatggtttctgcacagcctgtatttcatggctcaagagttgctagcaactgattgtttgcctcaaggccacacaaagatgcaatttatctggctatggatatgaacaggcttttctttctttcttttttatcgtttttttgtttgtttgttttttttttttttgagacagggtttctctgtgtagctttggagcctatcctggcactctctctggagaccaggctggccttgaactcacagagatccacctgcctctgcctcccgagtgctgggattaaaggcgtgtgccaccaacgaccaggcgccttttttttgggggggggggcagacttttcttaactttccataaataaaagctacaactcgtattagagaaaatgccccctgcaaaaggtcagtgaaacctcaagttagcataagcatcgtagcctgtcgatagccaagcaactcagacggcaagctcttgtttttcttgttgaagccaagcaaggtctctgctctccctccctcacaagaaagagcactctactcccctgtaaataaaggtggggatgagaagagagggtaggaaggtcatctgggggagccgcttcgccccagcattgtcttcccctaggaagaatttcttcctctgcctggaaaagcccctttcaggatgatagatttcctgtgaagcatcggttgatggtggcaggtgggaaaactgtgggacctgcgctctgtgccaggctggaaacagaatttgccctttagtcagagcagcgggaaatccataaaagaaaagggcctcaaagatttacaagtggggtttaaatgcgtggaaattaatcgcatataaacccagtgcagaggagttaggcggctgcacaataagtgagggagtaggtggtggttcaggtgagacgtgggagggccttcccgacatgcatgtgagtctggaggcttgaaagtgaagactccttccagcaccgtgcaggcgggagttctcctccagtcacagccgccacaaaggcccacatctgctgaataaacgcacccactgagctcctgattctcttcttcacttaaaagcggtgaacttgagttgaaggaaaacacgtttaagtttggattctatctggtggaggctgtgtgggcaagggccccatggcacgcaacgttgtcagaggactttgtggcatcagttctcttctcccatcttcctgagggctccagggaacaggttcaggctgtgtagccattgctttacccactgggccatccggccagccctgaaagaaacatttccataaatctctgtcctctccacctcatgcatgtttctcttgccttgaatttcatggggaagtgaaaatccacaccgtggttattctcgaaacggcagctcagtatttgcaagatatcagtgacctgataccatgcttcaggaacaatgctggagagcatccctagagctctaaaacatgcagtaactcactggctgtcctagttagggtttctatcactgtgatgaaacgtggtgaccaaaataccttagggtgggaggggttttttgttttgcttaccttccacttcactgttcaacattgaaggaagtcgggacaggaactcaaacagggcaggaacctggaggcaggagctgaggcagaggccatggaggagtgctgcttactgacttgctcagcctgctttcttatagaacacaggattatcagcccagggatggcaccacgcaccgggggctgggccctcacccgttgattactaattgaaaaactgccctacaaagggatcttatggagtcattttctctattgaggtttcctttcagataactctaccgtatgtcaagttgacagaaaactagccagaacactgtagaaacatggcggcaggggtggggggtagggggaggttacagcttcatttgctgtatggaagctcctgaagttttaatacccattggggctgagagtgatttgctttccaagaacagcatcttcaaatactttccattagggttagagcttggtggttaagagtgtaagacccgaggaatctcaggcctccaggatctcagcccaggaccacggtcaccccaatcaccaggcagattctaaagcttgatgcaaacagcacaaggctttattgttgtttaacgagctaacctcatgttagctcggatctttcatccacccaccatggcagactgctccaagcgtctgcatagagatcttgtagggcagcgtaatgggagtgtctaggggtacgcacaggctcaggattggtgtgcctccaggcttggagggcttgccctgtgttgattggtcaactggttgttatggcccataggccctcccagggtggttgctatgctctgcgcatcattgctatgcacttgtccataaagcacacccagaaccgtaaagcatagcaccaccagctaacttctgattggttccttgccacgaggcaggcatctgacctcctagtgactaagacgaggtcagacaaacatgtgttcggctgttatagctgccgaaatggggatctggtcccttcaagagcactggccacccctccagaggacccagcttcatttccaacacccacatagtgtctcacaaccatccataactctagtcccaagagatctgctgccctcttttggtctccttcaggaccaggcttgcatgttgttcacaggttgacagtcatatgttcagccaaaacacccatacacatttaaaaaaaacaaaaccaaaaaaaaaaaaaaaccctttccatttatcacatgtaactgcatgcacttcccaccctgctttcagatgcaagaccggtgttgaaatgtccacttccgcattagcatgtctacaggtgctgctttgtttgggtcttgtttatgcagtcattatgcagtatcatgggtggagcatccctgtcatactgaggagacacaatctcacaggaaactttctctggctctcacagtctttccactccctccaagatggtctctgagccttagacacaggccttggcaacaccacaatcttgatctgaatgtttgctggaaatcctcaaacagaaacacagtgatgcacagtgataatctgtgtaattgcaagatactcttcccagggcagattttttggtgttgttgttttttgttttgttttgtttttcccgttcaagttgtctgcagaactaaacaaagccaaatagcttagccgaagagataacagacactggcttctgaggggtctgggctagaaggcttcctttgtatgtcagggttctcagttacagagtgactattcttgcattgacctgcttcataggtaatggctgtagtcattgcctagtggcttttcagctagtaaattagtgacctgctgagggtgaacaattggatggagtgtgacaagggaaaggcactttagctgctacaacactcggcaaaaagcttcaatgtattcagaggagaaagagctgttcctccctatggagtctaaacaaaagctcctgcttctttcctcctgttcccttccttccaggatagcagccttgggaaactaaccggaaattgttctgtttaagatttaaagccaaattcagcttctaatccaatctgttacttgaataaatttcttcatcttgatgaagtttattttacttaaaaagcacaccaaggaggggctcagtgcgtgagagtggtagctgtgtagtcaaacccccagcacctatatgacagctctgaggggttgtacttgtgccttgtaacactggtgctatgaggaaacagagtcaggattgtggagcttgcaggctgcaagagatccagggtcagggagagatcctgtcccaaggaataaggtgtaaagagagtgcaagacattcaattcttcctcaggcttctgcaggtgagtgtgggtgtgagtatccccacataagcatgctcgtgtgaatccgatcacacacacacacacacacacacacacacacacacacacacacgcacatgcgtatgtcaaatatttattcctggtctactatattagtcagggtcctctaaaggaacagaactgagagaatgaaagcatatatatatatatatatatatatatatatatatatatatataaaatatatatgagatttactagagtggcttatagtttgtggtccagattgtccaacaacagctgtttcccaatgaaaaggccaagatccagtagttgttcagtccacaaggctggatgtctcagcacttccaatctgtgatgggggctggagggaatttttagagagctgttgttcttcagcctacaatggagtccagaagaggtaggatctaacaccagcaaaggatagatgtacttgccagtgagaacaaaggaaaaaaagaacaaagcaaaaacttcctgttttgcccttttatgtagactaccaccagaagatgtggccctgatttagggtaggacttcctacctcaaaagatccaatcaagaaaatcccccacaggtgtgccctgctgctcttggggtttcagttgttttcgggtgtagtcaagttgacaacctcggttagccatcacacctactaagtaggcagtaattgtaaaacaggcagagtatgcaggtgttctctgctgtggttgaatagctgtataggttgtcctgagattccagcttgtgaggatgcatggatgaaccagagtatgactctgtctcctttgtcttggcagctcctattctccatggggttgaacttcagtcttctgccaggtttatttctaatatcctttgcttttgtattatgtcttatttcttggtacattctacttttggaaatcctaatgactacaatgaaccaatcaagggagggaggttccagatgagttggaaggctgtttactggacatgaacaaatctttagttttggccccagtaccacacagactagaattctggaggcagaggtgggaaaataagatgctcaaggtcaccctcagctctacagaaagtttgaagccagcttggctcaataatatattggccttttaatttgcctccagctttcagttctttgacatgtccctgttctttcgggagtgtagtattgaacccactaaacaattttagctaggggtgtgatctctctaagtctttgcttcttaatgtataaatgtaatggcttcagttattcttatataaatataatgtttttattaattctttgagatttcatacattcttatactgtgttttgatcttgttcaatcccacttcttcccctaacagatccaacacctgctttcataccccttccaaattccaaacttgtgttctcttttctttcttctttctttctttctttctttctttctttctttctttctgtctgtctttctttctctctttctctctttctttctttctttctttctttctttctttctttctttcttcctttcttcctttgtaactcaccaagtctaatttgtgctgtccatgtactagcgggtgttagggggggacccatgcttgacctaccaggagctgtacctttaaagaaaaatggcaatcttttctccagaaggaataaactatcaagagctcctcagttagtggtagaggctaatgtgcccttccttctccagtgctggaatgcagatggatttgatcttatccagatcctatacaagcaagcacagctgctgtaagttcctgcaggcaattgtttttgtcatgtctgggggacattgtttccctccagtaatccccaacctctgactcttacaattatcccactttgtctttcacaatggtacctgagctttagagagaattgtgatatggatgtcccgtttgtggctgagtactccaaagacacttatcctcttcactttgcccagttgcaacattctgagctaactagcatccattacactaagtaacttctctgatgatgcctaagagctgcacaaacctatgcgtgcagagatacaactttagaggacaatttgatataagtaataacagtggtttcacacctagggcctctgagctctccaaccatgggttcttagcccaatttacagtaccagaaatgtactgcctcctatagaatgggccttaaatccagttagaaagggattgattacccacgtaatagttgtgctattattgcagccatagacatagcttgccacagcagtcattattatagctcacatgagtcacaggtgggtaagacagctgtgaccttttccccagaggaccactgcagctttggatgctatgaaaactagctagcagagaagaagtttctagttagtagcaattttattactccttgtcctgtgaccaaagtgtgcaatgctttcagcagaaaggtcttgctgtaaatttctggtggtctcagacctttatttttaaggaaacttctgtcttctcattttctgtgggacttctgtttattttttattttattttttattttttgggggggttcgagacagggtttccccgtggctttggaggctgtcctagaactagctcttgcagaccaggctggtctcgaactcacagagatctacctgcctctgcctcccgagtgctgggattaaaggcgtgtgccacca
